United States Patent Application Publication US 2006/0046253 A1 - sequence listing, part 12

SEQ ID NO: 177091 - DNA, 25 bp, Saccharomyces pastorianus
acaagttggctctggttttggttca

SEQ ID NO: 177092 - DNA, 25 bp, Saccharomyces pastorianus
tctgtgcaggatttgtttaactcat

SEQ ID NO: 177093 - DNA, 25 bp, Saccharomyces pastorianus
gttttggttcaaatccgcttcatat

SEQ ID NO: 177094 - DNA, 25 bp, Saccharomyces pastorianus
gaagacggctttgctttccaaagac

SEQ ID NO: 177095 - DNA, 25 bp, Saccharomyces pastorianus
cacagacataccagtcagtgatgat

SEQ ID NO: 177096 - DNA, 25 bp, Saccharomyces pastorianus
agctttgccatccatcacagacata

SEQ ID NO: 177097 - DNA, 25 bp, Saccharomyces pastorianus
aaagacacttccctcactgattctg

SEQ ID NO: 177098 - DNA, 25 bp, Saccharomyces pastorianus
ggcctttccacattcatctattgaa

SEQ ID NO: 177099 - DNA, 25 bp, Saccharomyces pastorianus
gtagatacgttagcacttaccagtg

SEQ ID NO: 177100 - DNA, 25 bp, Saccharomyces pastorianus
gatgcgaacgctaaagctttgccat

SEQ ID NO: 177101 - DNA, 25 bp, Saccharomyces pastorianus
acgtatactacatcgagaccaagat

SEQ ID NO: 177102 - DNA, 25 bp, Saccharomyces pastorianus
tatactacatcgagaccaagatgaa

SEQ ID NO: 177103 - DNA, 25 bp, Saccharomyces pastorianus
gtatactacatcgagaccaagatga

SEQ ID NO: 177104 - DNA, 25 bp, Saccharomyces pastorianus
ctacatcgagaccaagatgaacatt

SEQ ID NO: 177105 - DNA, 25 bp, Saccharomyces pastorianus
agaccaagatgaacattgctgatgt

SEQ ID NO: 177106 - DNA, 25 bp, Saccharomyces pastorianus
atactacatcgagaccaagatgaac

SEQ ID NO: 177107 - DNA, 25 bp, Saccharomyces pastorianus
acatcgagaccaagatgaacattgc

SEQ ID NO: 177108 - DNA, 25 bp, Saccharomyces pastorianus
tacatcgagaccaagatgaacattg

SEQ ID NO: 177109 - DNA, 25 bp, Saccharomyces pastorianus
cgtatactacatcgagaccaagatg

SEQ ID NO: 177110 - DNA, 25 bp, Saccharomyces pastorianus
atcgagaccaagatgaacattgctg

SEQ ID NO: 177111 - DNA, 25 bp, Saccharomyces pastorianus
tactacatcgagaccaagatgaaca

SEQ ID NO: 177112 - DNA, 25 bp, Saccharomyces pastorianus
tcgctttcctcatcactgctgcaat

SEQ ID NO: 177113 - DNA, 25 bp, Saccharomyces pastorianus
tgcaatactttctgcacctgtcact

SEQ ID NO: 177114 - DNA, 25 bp, Saccharomyces pastorianus
tttcctcatcactgctgcaatactt

SEQ ID NO: 177115 - DNA, 25 bp, Saccharomyces pastorianus
ctttcctcatcactgctgcaatact

SEQ ID NO: 177116 - DNA, 25 bp, Saccharomyces pastorianus
cgctttcctcatcactgctgcaata

SEQ ID NO: 177117 - DNA, 25 bp, Saccharomyces pastorianus
gcacgtgtcgctttcctcatcactg

SEQ ID NO: 177118 - DNA, 25 bp, Saccharomyces pastorianus
ttcctcatcactgctgcaatacttt

SEQ ID NO: 177119 - DNA, 25 bp, Saccharomyces pastorianus
tgcacgtgtcgctttcctcatcact

SEQ ID NO: 177120 - DNA, 25 bp, Saccharomyces pastorianus
tgtcgctttcctcatcactgctgca

SEQ ID NO: 177121 - DNA, 25 bp, Saccharomyces pastorianus
gctttcctcatcactgctgcaatac

SEQ ID NO: 177122 - DNA, 25 bp, Saccharomyces pastorianus
acgtgtcgctttcctcatcactgct

SEQ ID NO: 177123 - DNA, 25 bp, Saccharomyces pastorianus
caccaaatcatcatggtagcgccta

SEQ ID NO: 177124 - DNA, 25 bp, Saccharomyces pastorianus
aaatcatcatggtagcgcctatgct

SEQ ID NO: 177125 - DNA, 25 bp, Saccharomyces pastorianus
caaatcatcatggtagcgcctatgc

SEQ ID NO: 177126 - DNA, 25 bp, Saccharomyces pastorianus
aaaattcaccaaatcatcatggtag

SEQ ID NO: 177127 - DNA, 25 bp, Saccharomyces pastorianus
attcaccaaatcatcatggtagcgc

SEQ ID NO: 177128 - DNA, 25 bp, Saccharomyces pastorianus
atcatcatggtagcgcctatgcttc

SEQ ID NO: 177129 - DNA, 25 bp, Saccharomyces pastorianus
ttcaccaaatcatcatggtagcgcc

SEQ ID NO: 177130 - DNA, 25 bp, Saccharomyces pastorianus
aaattcaccaaatcatcatggtagc

SEQ ID NO: 177131 - DNA, 25 bp, Saccharomyces pastorianus
aattcaccaaatcatcatggtagcg

SEQ ID NO: 177132 - DNA, 25 bp, Saccharomyces pastorianus
tcaccaaatcatcatggtagcgcct

SEQ ID NO: 177133 - DNA, 25 bp, Saccharomyces pastorianus
accaaatcatcatggtagcgcctat

SEQ ID NO: 177134 - DNA, 25 bp, Saccharomyces pastorianus
ttgttattatcctacgttattcccg

SEQ ID NO: 177135 - DNA, 25 bp, Saccharomyces pastorianus
aaagatctggatgctgtcttgtcat

SEQ ID NO: 177136 - DNA, 25 bp, Saccharomyces pastorianus
ggtgtgcctttgaatgctcatctga

SEQ ID NO: 177137 - DNA, 25 bp, Saccharomyces pastorianus
ttacttggcctctagtacagctttc

SEQ ID NO: 177138 - DNA, 25 bp, Saccharomyces pastorianus
gaccattctggctcggcaaatttgg

SEQ ID NO: 177139 - DNA, 25 bp, Saccharomyces pastorianus
gctcatctgatgtcatgtgcttgga

SEQ ID NO: 177140 - DNA, 25 bp, Saccharomyces pastorianus
acatcttttggttgtgtcattgcct

SEQ ID NO: 177141 - DNA, 25 bp, Saccharomyces pastorianus
gggcgccaattctggacatctacaa

SEQ ID NO: 177142 - DNA, 25 bp, Saccharomyces pastorianus
atccttgattggtctgctttacttg

SEQ ID NO: 177143 - DNA, 25 bp, Saccharomyces pastorianus
gtgacatcgcacatggaccattctg

SEQ ID NO: 177144 - DNA, 25 bp, Saccharomyces pastorianus
gtcaatccacatactggtgtgcctt

SEQ ID NO: 177145 - DNA, 25 bp, Saccharomyces pastorianus
ttaaaccggagctatctgcaaccca

SEQ ID NO: 177146 - DNA, 25 bp, Saccharomyces pastorianus
ttgaaggcttaaaccggagctatct

SEQ ID NO: 177147 - DNA, 25 bp, Saccharomyces pastorianus
attgaaggcttaaaccggagctatc

SEQ ID NO: 177148 - DNA, 25 bp, Saccharomyces pastorianus
cttaaaccggagctatctgcaaccc

SEQ ID NO: 177149 - DNA, 25 bp, Saccharomyces pastorianus
tgaaggcttaaaccggagctatctg

SEQ ID NO: 177150 - DNA, 25 bp, Saccharomyces pastorianus
ccagctattgaaggcttaaaccgga

SEQ ID NO: 177151 - DNA, 25 bp, Saccharomyces pastorianus
ggcttaaaccggagctatctgcaac

SEQ ID NO: 177152 - DNA, 25 bp, Saccharomyces pastorianus
aggcttaaaccggagctatctgcaa

SEQ ID NO: 177153 - DNA, 25 bp, Saccharomyces pastorianus
tattgaaggcttaaaccggagctat

SEQ ID NO: 177154 - DNA, 25 bp, Saccharomyces pastorianus
gctattgaaggcttaaaccggagct

SEQ ID NO: 177155 - DNA, 25 bp, Saccharomyces pastorianus
gcttaaaccggagctatctgcaacc

SEQ ID NO: 177156 - DNA, 25 bp, Saccharomyces pastorianus
gcgcgtcattgaaataagcaggaac

SEQ ID NO: 177157 - DNA, 25 bp, Saccharomyces pastorianus
catccttggtggcttgtctttgcgc

SEQ ID NO: 177158 - DNA, 25 bp, Saccharomyces pastorianus
tggcttgtctttgcgcgtcattgaa

SEQ ID NO: 177159 - DNA, 25 bp, Saccharomyces pastorianus
aacgttcaaaccagcgatggtacca

SEQ ID NO: 177160 - DNA, 25 bp, Saccharomyces pastorianus
caaaccgtaggcaatggcggctgcg

SEQ ID NO: 177161 - DNA, 25 bp, Saccharomyces pastorianus
agatttatccaaaccgtaggcaatg

SEQ ID NO: 177162 - DNA, 25 bp, Saccharomyces pastorianus
ttccttatcagatttatccaaaccg

SEQ ID NO: 177163 - DNA, 25 bp, Saccharomyces pastorianus
aattctcaaaacgttcaaaccagcg

SEQ ID NO: 177164 - DNA, 25 bp, Saccharomyces pastorianus
gcggttggttcattaacaattctca

SEQ ID NO: 177165 - DNA, 25 bp, Saccharomyces pastorianus
ttgtctttgcgcgtcattgaaataa

SEQ ID NO: 177166 - DNA, 25 bp, Saccharomyces pastorianus
ggcggctgcggttggttcattaaca

SEQ ID NO: 177167 - DNA, 25 bp, Saccharomyces pastorianus
acaataccagtatcgatttctgact

SEQ ID NO: 177168 - DNA, 25 bp, Saccharomyces pastorianus
taccagtatcgatttctgactttga

SEQ ID NO: 177169 - DNA, 25 bp, Saccharomyces pastorianus
caaagtattgcaacacaagataaca

SEQ ID NO: 177170 - DNA, 25 bp, Saccharomyces pastorianus
aataccagtatcgatttctgacttt

SEQ ID NO: 177171 - DNA, 25 bp, Saccharomyces pastorianus
cacaataccagtatcgatttctgac

SEQ ID NO: 177172 - DNA, 25 bp, Saccharomyces pastorianus
ataccagtatcgatttctgactttg

SEQ ID NO: 177173 - DNA, 25 bp, Saccharomyces pastorianus
tcaaagtattgcaacacaagataac

SEQ ID NO: 177174 - DNA, 25 bp, Saccharomyces pastorianus
ttatcaaagtattgcaacacaagat

SEQ ID NO: 177175 - DNA, 25 bp, Saccharomyces pastorianus
tttatcaaagtattgcaacacaaga

SEQ ID NO: 177176 - DNA, 25 bp, Saccharomyces pastorianus
atcaaagtattgcaacacaagataa

SEQ ID NO: 177177 - DNA, 25 bp, Saccharomyces pastorianus
tatcaaagtattgcaacacaagata

SEQ ID NO: 177178 - DNA, 25 bp, Saccharomyces pastorianus
attctcaccaagagacaaccctggg

SEQ ID NO: 177179 - DNA, 25 bp, Saccharomyces pastorianus
gaatttgatagagattccactaagg

SEQ ID NO: 177180 - DNA, 25 bp, Saccharomyces pastorianus
atgctcttcatggtagcgcctatgc

SEQ ID NO: 177181 - DNA, 25 bp, Saccharomyces pastorianus
gctcttcatggtagcgcctatgctt

SEQ ID NO: 177182 - DNA, 25 bp, Saccharomyces pastorianus
taattctcaccaagagacaaccctg

SEQ ID NO: 177183 - DNA, 25 bp, Saccharomyces pastorianus
tgctcttcatggtagcgcctatgct

SEQ ID NO: 177184 - DNA, 25 bp, Saccharomyces pastorianus
ttctcaccaagagacaaccctggga

SEQ ID NO: 177185 - DNA, 25 bp, Saccharomyces pastorianus
ttaattctcaccaagagacaaccct

SEQ ID NO: 177186 - DNA, 25 bp, Saccharomyces pastorianus
catgctcttcatggtagcgcctatg

SEQ ID NO: 177187 - DNA, 25 bp, Saccharomyces pastorianus
ctcttcatggtagcgcctatgcttc

SEQ ID NO: 177188 - DNA, 25 bp, Saccharomyces pastorianus
aattctcaccaagagacaaccctgg

SEQ ID NO: 177189 - DNA, 25 bp, Saccharomyces pastorianus
acttgtggcgaagtttctgtatcca

SEQ ID NO: 177190 - DNA, 25 bp, Saccharomyces pastorianus
aagccaaatgggacgaaactgatga

SEQ ID NO: 177191 - DNA, 25 bp, Saccharomyces pastorianus
gtttctgtatccaatctttctctta

SEQ ID NO: 177192 - DNA, 25 bp, Saccharomyces pastorianus
cgttgggaccaagcactatatctat

SEQ ID NO: 177193 - DNA, 25 bp, Saccharomyces pastorianus
attgattgaattcccatttttacca

SEQ ID NO: 177194 - DNA, 25 bp, Saccharomyces pastorianus
ttctacgaagagagcgacagtggac

SEQ ID NO: 177195 - DNA, 25 bp, Saccharomyces pastorianus
gagaggactttgaacttgtatgaaa

SEQ ID NO: 177196 - DNA, 25 bp, Saccharomyces pastorianus
gcgccaaactttagcaccatatgcc

SEQ ID NO: 177197 - DNA, 25 bp, Saccharomyces pastorianus
actatttgattttacttgtggcgaa

SEQ ID NO: 177198 - DNA, 25 bp, Saccharomyces pastorianus
gcactatatctattgcttttattga

SEQ ID NO: 177199 - DNA, 25 bp, Saccharomyces pastorianus
atgccattttatcacagttctacga

SEQ ID NO: 177200 - DNA, 25 bp, Saccharomyces pastorianus
gaaattgcaagtactgtaaatcgga

SEQ ID NO: 177201 - DNA, 25 bp, Saccharomyces pastorianus
cagactcgcattattcagaaagaaa

SEQ ID NO: 177202 - DNA, 25 bp, Saccharomyces pastorianus
aaattgcaagtactgtaaatcggaa

SEQ ID NO: 177203 - DNA, 25 bp, Saccharomyces pastorianus
aagaaattgcaagtactgtaaatcg

SEQ ID NO: 177204 - DNA, 25 bp, Saccharomyces pastorianus
tgcaagtactgtaaatcggaattac

SEQ ID NO: 177205 - DNA, 25 bp, Saccharomyces pastorianus
aattgcaagtactgtaaatcggaat

SEQ ID NO: 177206 - DNA, 25 bp, Saccharomyces pastorianus
caagtactgtaaatcggaattacac

SEQ ID NO: 177207 - DNA, 25 bp, Saccharomyces pastorianus
ttgcaagtactgtaaatcggaatta

SEQ ID NO: 177208 - DNA, 25 bp, Saccharomyces pastorianus
ctcgcattattcagaaagaaattgc

SEQ ID NO: 177209 - DNA, 25 bp, Saccharomyces pastorianus
gactcgcattattcagaaagaaatt

SEQ ID NO: 177210 - DNA, 25 bp, Saccharomyces pastorianus
agactcgcattattcagaaagaaat

SEQ ID NO: 177211 - DNA, 25 bp, Saccharomyces pastorianus
cttttccccttccaatgacaagtat

SEQ ID NO: 177212 - DNA, 25 bp, Saccharomyces pastorianus
ttttccctatttcacttctatggtc

SEQ ID NO: 177213 - DNA, 25 bp, Saccharomyces pastorianus
tgatgctacttctagttttccctat

SEQ ID NO: 177214 - DNA, 25 bp, Saccharomyces pastorianus
gatccaggtggacttagcagcagca

SEQ ID NO: 177215 - DNA, 25 bp, Saccharomyces pastorianus
agttcccctatcatcacacagtaat

SEQ ID NO: 177216 - DNA, 25 bp, Saccharomyces pastorianus
attctcaagccgttactactactac

SEQ ID NO: 177217 - DNA, 25 bp, Saccharomyces pastorianus
gccatcggtaatctctgctgaagga

SEQ ID NO: 177218 - DNA, 25 bp, Saccharomyces pastorianus
ggaccaaagtcctatgataccgaac

SEQ ID NO: 177219 - DNA, 25 bp, Saccharomyces pastorianus
aaatctctctatctgattcctcgaa

SEQ ID NO: 177220 - DNA, 25 bp, Saccharomyces pastorianus
ataagtcatatcagccatcggtaat

SEQ ID NO: 177221 - DNA, 25 bp, Saccharomyces pastorianus
acaacgttcaacttttctggtgata

SEQ ID NO: 177222 - DNA, 25 bp, Saccharomyces pastorianus
agatgaagtatcaggtaataattta

SEQ ID NO: 177223 - DNA, 25 bp, Saccharomyces pastorianus
acgtatactacatcgagaccaagaa

SEQ ID NO: 177224 - DNA, 25 bp, Saccharomyces pastorianus
catcgagaccaagaagaacattgct

SEQ ID NO: 177225 - DNA, 25 bp, Saccharomyces pastorianus
gtatactacatcgagaccaagaaga

SEQ ID NO: 177226 - DNA, 25 bp, Saccharomyces pastorianus
ctacatcgagaccaagaagaacatt

SEQ ID NO: 177227 - DNA, 25 bp, Saccharomyces pastorianus
gatgaagtatcaggtaataatttat

SEQ ID NO: 177228 - DNA, 25 bp, Saccharomyces pastorianus
atactacatcgagaccaagaagaac

SEQ ID NO: 177229 - DNA, 25 bp, Saccharomyces pastorianus
caggtaataatttatacgtatacta

SEQ ID NO: 177230 - DNA, 25 bp, Saccharomyces pastorianus
cgtatactacatcgagaccaagaag

SEQ ID NO: 177231 - DNA, 25 bp, Saccharomyces pastorianus
gaccaagaagaacattgctgatgtg

SEQ ID NO: 177232 - DNA, 25 bp, Saccharomyces pastorianus
atcaggtaataatttatacgtatac

SEQ ID NO: 177233 - DNA, 25 bp, Saccharomyces pastorianus
ccaatggtccttgctggatcagcag

SEQ ID NO: 177234 - DNA, 25 bp, Saccharomyces pastorianus
acagtcgtcagtacagttgcggtgg

SEQ ID NO: 177235 - DNA, 25 bp, Saccharomyces pastorianus
gtcttatcataaccaacgcagctag

SEQ ID NO: 177236 - DNA, 25 bp, Saccharomyces pastorianus
gcaagttccttaagggctgtgccgc

SEQ ID NO: 177237 - DNA, 25 bp, Saccharomyces pastorianus
cagttcatcctttagtgtcgcgaga

SEQ ID NO: 177238 - DNA, 25 bp, Saccharomyces pastorianus
ggtggacggctacttttacatgttc

SEQ ID NO: 177239 - DNA, 25 bp, Saccharomyces pastorianus
gattatccgtttcaacagcctattc

SEQ ID NO: 177240 - DNA, 25 bp, Saccharomyces pastorianus
aaatctactcgtatatctgctcaga

SEQ ID NO: 177241 - DNA, 25 bp, Saccharomyces pastorianus
agtccatgactcctacagattatcc

SEQ ID NO: 177242 - DNA, 25 bp, Saccharomyces pastorianus
gcgagagacgactataacggccatt

SEQ ID NO: 177243 - DNA, 25 bp, Saccharomyces pastorianus
aagaccacggtgtccagattcaggg

SEQ ID NO: 177244 - DNA, 25 bp, Saccharomyces pastorianus
agatgaagtatcaggtaataattta

SEQ ID NO: 177245 - DNA, 25 bp, Saccharomyces pastorianus
acgtatactacatcgagaccaagaa

SEQ ID NO: 177246 - DNA, 25 bp, Saccharomyces pastorianus
catcgagaccaagaagaacattgct

SEQ ID NO: 177247 - DNA, 25 bp, Saccharomyces pastorianus
gtatactacatcgagaccaagaaga

SEQ ID NO: 177248 - DNA, 25 bp, Saccharomyces pastorianus
ctacatcgagaccaagaagaacatt

SEQ ID NO: 177249 - DNA, 25 bp, Saccharomyces pastorianus
atactacatcgagaccaagaagaac

SEQ ID NO: 177250 - DNA, 25 bp, Saccharomyces pastorianus
caggtaataatttatacgtatacta

SEQ ID NO: 177251 - DNA, 25 bp, Saccharomyces pastorianus
cgtatactacatcgagaccaagaag

SEQ ID NO: 177252 - DNA, 25 bp, Saccharomyces pastorianus
gaccaagaagaacattgctgatgtg

SEQ ID NO: 177253 - DNA, 25 bp, Saccharomyces pastorianus
atcaggtaataatttatacgtatac

SEQ ID NO: 177254 - DNA, 25 bp, Saccharomyces pastorianus
tactacatcgagaccaagaagaaca

SEQ ID NO: 177255 - DNA, 25 bp, Saccharomyces pastorianus
ttgctatgggaaacgaacactttaa

SEQ ID NO: 177256 - DNA, 25 bp, Saccharomyces pastorianus
gctggccattccatatgacgagttt

SEQ ID NO: 177257 - DNA, 25 bp, Saccharomyces pastorianus
gatggtgtctgggtaagctgaatta

SEQ ID NO: 177258 - DNA, 25 bp, Saccharomyces pastorianus
gctgaattatgagctggccattcca

SEQ ID NO: 177259 - DNA, 25 bp, Saccharomyces pastorianus
gcaaaggatctatctctaatggaaa

SEQ ID NO: 177260 - DNA, 25 bp, Saccharomyces pastorianus
agtgggctccatgcaaaggatctat

SEQ ID NO: 177261 - DNA, 25 bp, Saccharomyces pastorianus
caacgctccggtgaagagacccaga

SEQ ID NO: 177262 - DNA, 25 bp, Saccharomyces pastorianus
aattggcaaattataagtgggctcc

SEQ ID NO: 177263 - DNA, 25 bp, Saccharomyces pastorianus
atatgacgagtttttgctatgggaa

SEQ ID NO: 177264 - DNA, 25 bp, Saccharomyces pastorianus
gaaagcgaaattgcgcgtcggaact

SEQ ID NO: 177265 - DNA, 25 bp, Saccharomyces pastorianus
agagacccagagaatcagacaatga

SEQ ID NO: 177266 - DNA, 25 bp, Saccharomyces pastorianus
atgtgatgaccaaacctcttccgat

SEQ ID NO: 177267 - DNA, 25 bp, Saccharomyces pastorianus
tgatgaccaaacctcttccgataaa

SEQ ID NO: 177268 - DNA, 25 bp, Saccharomyces pastorianus
gtgatgaccaaacctcttccgataa

SEQ ID NO: 177269 - DNA, 25 bp, Saccharomyces pastorianus
ctgatgtgatgaccaaacctcttcc

SEQ ID NO: 177270 - DNA, 25 bp, Saccharomyces pastorianus
gctgatgtgatgaccaaacctcttc

SEQ ID NO: 177271 - DNA, 25 bp, Saccharomyces pastorianus
tgctgatgtgatgaccaaacctctt

SEQ ID NO: 177272 - DNA, 25 bp, Saccharomyces pastorianus
gatgtgatgaccaaacctcttccga

SEQ ID NO: 177273 - DNA, 25 bp, Saccharomyces pastorianus
gatgaccaaacctcttccgataaaa

SEQ ID NO: 177274 - DNA, 25 bp, Saccharomyces pastorianus
tgatgtgatgaccaaacctcttccg

SEQ ID NO: 177275 - DNA, 25 bp, Saccharomyces pastorianus
aacattgctgatgtgatgaccaaac

SEQ ID NO: 177276 - DNA, 25 bp, Saccharomyces pastorianus
tgtgatgaccaaacctcttccgata

SEQ ID NO: 177277 - DNA, 25 bp, Saccharomyces pastorianus
tggatggtatggacgtagttcacta

SEQ ID NO: 177278 - DNA, 25 bp, Saccharomyces pastorianus
tgcctgtaaaggaagttattattgt

SEQ ID NO: 177279 - DNA, 25 bp, Saccharomyces pastorianus
tggtgaactggaaactgttcctttg

SEQ ID NO: 177280 - DNA, 25 bp, Saccharomyces pastorianus
tgaaaacgttaagaccgacagtaga

SEQ ID NO: 177281 - DNA, 25 bp, Saccharomyces pastorianus
gaaactgttcctttggacaataaag

SEQ ID NO: 177282 - DNA, 25 bp, Saccharomyces pastorianus
ggacaataaagacgccgccaagcta

SEQ ID NO: 177283 - DNA, 25 bp, Saccharomyces pastorianus
gtatggacgtagttcactacattga

SEQ ID NO: 177284 - DNA, 25 bp, Saccharomyces pastorianus
actggaaactgttcctttggacaat

SEQ ID NO: 177285 - DNA, 25 bp, Saccharomyces pastorianus
gaccgacagtagaaatatgcctgta

SEQ ID NO: 177286 - DNA, 25 bp, Saccharomyces pastorianus
aaagacgccgccaagctacaggaag

SEQ ID NO: 177287 - DNA, 25 bp, Saccharomyces pastorianus
cgtagttcactacattgaaaacgtt

SEQ ID NO: 177288 - DNA, 25 bp, Saccharomyces pastorianus
aattaccaccgattaaggaaggctg

SEQ ID NO: 177289 - DNA, 25 bp, Saccharomyces pastorianus
tcgtaagggtgaattaccaccgatt

SEQ ID NO: 177290 - DNA, 25 bp, Saccharomyces pastorianus
taagggtgaattaccaccgattaag

SEQ ID NO: 177291 - DNA, 25 bp, Saccharomyces pastorianus
attaccaccgattaaggaaggctgt

SEQ ID NO: 177292 - DNA, 25 bp, Saccharomyces pastorianus
gattaaggaaggctgtataaccgaa

SEQ ID NO: 177293 - DNA, 25 bp, Saccharomyces pastorianus
gtgaattaccaccgattaaggaagg

SEQ ID NO: 177294 - DNA, 25 bp, Saccharomyces pastorianus
tgaattaccaccgattaaggaaggc

SEQ ID NO: 177295 - DNA, 25 bp, Saccharomyces pastorianus
aacagttgggcggcaaggaatcgta

SEQ ID NO: 177296 - DNA, 25 bp, Saccharomyces pastorianus
ggtgaattaccaccgattaaggaag

SEQ ID NO: 177297 - DNA, 25 bp, Saccharomyces pastorianus
atcgtaagggtgaattaccaccgat

SEQ ID NO: 177298 - DNA, 25 bp, Saccharomyces pastorianus
gaattaccaccgattaaggaaggct

SEQ ID NO: 177299 - DNA, 25 bp, Saccharomyces pastorianus
ttcctcatgaacaggtattttacat

SEQ ID NO: 177300 - DNA, 25 bp, Saccharomyces pastorianus
ctttcctcatgaacaggtattttac

SEQ ID NO: 177301 - DNA, 25 bp, Saccharomyces pastorianus
tttgcggttaagaaagtagctaggc

SEQ ID NO: 177302 - DNA, 25 bp, Saccharomyces pastorianus
gatgttgaatttgcggttaagaaag

SEQ ID NO: 177303 - DNA, 25 bp, Saccharomyces pastorianus
actttcctcatgaacaggtatttta

SEQ ID NO: 177304 - DNA, 25 bp, Saccharomyces pastorianus
cggttaagaaagtagctaggctagt

SEQ ID NO: 177305 - DNA, 25 bp, Saccharomyces pastorianus
aactttcctcatgaacaggtatttt

SEQ ID NO: 177306 - DNA, 25 bp, Saccharomyces pastorianus
tgcggttaagaaagtagctaggcta

SEQ ID NO: 177307 - DNA, 25 bp, Saccharomyces pastorianus
ttgcggttaagaaagtagctaggct

SEQ ID NO: 177308 - DNA, 25 bp, Saccharomyces pastorianus
gcggttaagaaagtagctaggctag

SEQ ID NO: 177309 - DNA, 25 bp, Saccharomyces pastorianus
cgatgttgaatttgcggttaagaaa

SEQ ID NO: 177310 - DNA, 25 bp, Saccharomyces pastorianus
ccttctctagtattgcggtcagcag

SEQ ID NO: 177311 - DNA, 25 bp, Saccharomyces pastorianus
gcagaggccaaatcctatatgcatt

SEQ ID NO: 177312 - DNA, 25 bp, Saccharomyces pastorianus
atattccttctctagtattgcggtc

SEQ ID NO: 177313 - DNA, 25 bp, Saccharomyces pastorianus
caatcaaattgcctataagcatgga

SEQ ID NO: 177314 - DNA, 25 bp, Saccharomyces pastorianus
atgtggttagcattgactccttaat

SEQ ID NO: 177315 - DNA, 25 bp, Saccharomyces pastorianus
ggccaaatcctatatgcattatatg

SEQ ID NO: 177316 - DNA, 25 bp, Saccharomyces pastorianus
gttgttgttttatattccttctcta

SEQ ID NO: 177317 - DNA, 25 bp, Saccharomyces pastorianus
atgctgggttacgttgttgttttat

SEQ ID NO: 177318 - DNA, 25 bp, Saccharomyces pastorianus
gaacggccagttatcaatcaaattg

SEQ ID NO: 177319 - DNA, 25 bp, Saccharomyces pastorianus
ttgcggtcagcagaggccaaatcct

SEQ ID NO: 177320 - DNA, 25 bp, Saccharomyces pastorianus
attgactccttaatagaacggccag

SEQ ID NO: 177321 - DNA, 25 bp, Saccharomyces pastorianus
ttaaaccggagctatctgcaaccca

SEQ ID NO: 177322 - DNA, 25 bp, Saccharomyces pastorianus
ttgaaggcttaaaccggagctatct

SEQ ID NO: 177323 - DNA, 25 bp, Saccharomyces pastorianus
attgaaggcttaaaccggagctatc

SEQ ID NO: 177324 - DNA, 25 bp, Saccharomyces pastorianus
cttaaaccggagctatctgcaaccc

SEQ ID NO: 177325 - DNA, 25 bp, Saccharomyces pastorianus
tgaaggcttaaaccggagctatctg

SEQ ID NO: 177326 - DNA, 25 bp, Saccharomyces pastorianus
ccagctattgaaggcttaaaccgga

SEQ ID NO: 177327 - DNA, 25 bp, Saccharomyces pastorianus
ggcttaaaccggagctatctgcaac

SEQ ID NO: 177328 - DNA, 25 bp, Saccharomyces pastorianus
aggcttaaaccggagctatctgcaa

SEQ ID NO: 177329 - DNA, 25 bp, Saccharomyces pastorianus
tattgaaggcttaaaccggagctat

SEQ ID NO: 177330 - DNA, 25 bp, Saccharomyces pastorianus
gctattgaaggcttaaaccggagct

SEQ ID NO: 177331 - DNA, 25 bp, Saccharomyces pastorianus
gcttaaaccggagctatctgcaacc

SEQ ID NO: 177332 - DNA, 25 bp, Saccharomyces pastorianus
agtgtgatcgacgaatccttgtcct

SEQ ID NO: 177333 - DNA, 25 bp, Saccharomyces pastorianus
ttgtctccttcactgctctcatttt

SEQ ID NO: 177334 - DNA, 25 bp, Saccharomyces pastorianus
tcatcgctccggtcaatcttcaata

SEQ ID NO: 177335 - DNA, 25 bp, Saccharomyces pastorianus
gaatccttgtcctccaatttatttt

SEQ ID NO: 177336 - DNA, 25 bp, Saccharomyces pastorianus
ttcatcttcctctatcgcttcatat

SEQ ID NO: 177337 - DNA, 25 bp, Saccharomyces pastorianus
aatgtcatcgagtaatcccttgtct

SEQ ID NO: 177338 - DNA, 25 bp, Saccharomyces pastorianus
atggttcagatctatggcaagttcc

SEQ ID NO: 177339 - DNA, 25 bp, Saccharomyces pastorianus
gagaatcctgttcttctaatcggag

SEQ ID NO: 177340 - DNA, 25 bp, Saccharomyces pastorianus
aaacagcttcttaatatggttcaga

SEQ ID NO: 177341 - DNA, 25 bp, Saccharomyces pastorianus
gctctcattttctttgtcatcgctc

SEQ ID NO: 177342 - DNA, 25 bp, Saccharomyces pastorianus
gtcaatcttcaataccaacactgga

SEQ ID NO: 177343 - DNA, 25 bp, Saccharomyces pastorianus
attctcaacaagagacacacctggg

SEQ ID NO: 177344 - DNA, 25 bp, Saccharomyces pastorianus
tctcttcatggtagcgcctatgctt

SEQ ID NO: 177345 - DNA, 25 bp, Saccharomyces pastorianus
attctcttcatggtagcgcctatgc

SEQ ID NO: 177346 - DNA, 25 bp, Saccharomyces pastorianus
ttctcttcatggtagcgcctatgct

SEQ ID NO: 177347 - DNA, 25 bp, Saccharomyces pastorianus
agcttccaatttaccggaatttgat

SEQ ID NO: 177348 - DNA, 25 bp, Saccharomyces pastorianus
ttcagcttccaatttaccggaattt

SEQ ID NO: 177349 - DNA, 25 bp, Saccharomyces pastorianus
ttctcaacaagagacacacctggga

SEQ ID NO: 177350 - DNA, 25 bp, Saccharomyces pastorianus
attccactaaggttaattctcaaca

SEQ ID NO: 177351 - DNA, 25 bp, Saccharomyces pastorianus
tcttcatggtagcgcctatgcttcg

SEQ ID NO: 177352 - DNA, 25 bp, Saccharomyces pastorianus
ctcttcatggtagcgcctatgcttc

SEQ ID NO: 177353 - DNA, 25 bp, Saccharomyces pastorianus
gattccactaaggttaattctcaac

SEQ ID NO: 177354 - DNA, 25 bp, Saccharomyces pastorianus
tattcgttggagaggaaaatcctgg

SEQ ID NO: 177355 - DNA, 25 bp, Saccharomyces pastorianus
atcgctgtcatcatcgccagtaagg

SEQ ID NO: 177356 - DNA, 25 bp, Saccharomyces pastorianus
cttcaacagagaatcgcaacggcga

SEQ ID NO: 177357 - DNA, 25 bp, Saccharomyces pastorianus
tagtcattctgaaccatcgctgtca

SEQ ID NO: 177358 - DNA, 25 bp, Saccharomyces pastorianus
gagttatactaagcctacttcaaca

SEQ ID NO: 177359 - DNA, 25 bp, Saccharomyces pastorianus
cattctgaaccatcgctgtcatcat

SEQ ID NO: 177360 - DNA, 25 bp, Saccharomyces pastorianus
gagatagtcattctgaaccatcgct

SEQ ID NO: 177361 - DNA, 25 bp, Saccharomyces pastorianus
aagcctacttcaacagagaatcgca

SEQ ID NO: 177362 - DNA, 25 bp, Saccharomyces pastorianus
caacttgatggagatagtcattctg

SEQ ID NO: 177363 - DNA, 25 bp, Saccharomyces pastorianus
gttcgcaaatgatattaaagacgtc

SEQ ID NO: 177364 - DNA, 25 bp, Saccharomyces pastorianus
aatcctggaaaagagttatactaag

SEQ ID NO: 177365 - DNA, 25 bp, Saccharomyces pastorianus
gccattgcggcgagtgaaggcatca

SEQ ID NO: 177366 - DNA, 25 bp, Saccharomyces pastorianus
aggcaaccccataagaatcgcgaaa

SEQ ID NO: 177367 - DNA, 25 bp, Saccharomyces pastorianus
gaaattgaagtgttccaccctgcca

SEQ ID NO: 177368 - DNA, 25 bp, Saccharomyces pastorianus
ccatccatgtgcgtggactgcgaga

SEQ ID NO: 177369 - DNA, 25 bp, Saccharomyces pastorianus
cacccactctttctatcttatacaa

SEQ ID NO: 177370 - DNA, 25 bp, Saccharomyces pastorianus
tagacgttccgcgttgcctggagtt

SEQ ID NO: 177371 - DNA, 25 bp, Saccharomyces pastorianus
gaagttgctctacaatgcagctatc

SEQ ID NO: 177372 - DNA, 25 bp, Saccharomyces pastorianus
tagaagtcatcctaggcaaccccat

SEQ ID NO: 177373 - DNA, 25 bp, Saccharomyces pastorianus
tactctcggtggaagaagttgctct

SEQ ID NO: 177374 - DNA, 25 bp, Saccharomyces pastorianus
ttgtcgaatttgaccctagggtccg

SEQ ID NO: 177375 - DNA, 25 bp, Saccharomyces pastorianus
tcttatacaacctacttgtgctagt

SEQ ID NO: 177376 - DNA, 25 bp, Saccharomyces pastorianus
aatccacattctctacatggtagcg

SEQ ID NO: 177377 - DNA, 25 bp, Saccharomyces pastorianus
cacattctctacatggtagcgccta

SEQ ID NO: 177378 - DNA, 25 bp, Saccharomyces pastorianus
aacagcacggcatgatgaccccaaa

SEQ ID NO: 177379 - DNA, 25 bp, Saccharomyces pastorianus
ctgggcacattaccaacaaccatct

SEQ ID NO: 177380 - DNA, 25 bp, Saccharomyces pastorianus
aaatccacattctctacatggtagc

SEQ ID NO: 177381 - DNA, 25 bp, Saccharomyces pastorianus
atccacattctctacatggtagcgc

SEQ ID NO: 177382 - DNA, 25 bp, Saccharomyces pastorianus
gtaccaacagcacggcatgatgacc

SEQ ID NO: 177383 - DNA, 25 bp, Saccharomyces pastorianus
ccacattctctacatggtagcgcct

SEQ ID NO: 177384 - DNA, 25 bp, Saccharomyces pastorianus
acattctctacatggtagcgcctat

SEQ ID NO: 177385 - DNA, 25 bp, Saccharomyces pastorianus
aactgggcacattaccaacaaccat

SEQ ID NO: 177386 - DNA, 25 bp, Saccharomyces pastorianus
tccacattctctacatggtagcgcc

SEQ ID NO: 177387 - DNA, 25 bp, Saccharomyces pastorianus
gacagtaataaagatgatgaccatt

SEQ ID NO: 177388 - DNA, 25 bp, Saccharomyces pastorianus
caatccacctttggcgacagtaata

SEQ ID NO: 177389 - DNA, 25 bp, Saccharomyces pastorianus
tccacctttggcgacagtaataaag

SEQ ID NO: 177390 - DNA, 25 bp, Saccharomyces pastorianus
tacttggacaatccacctttggcga

SEQ ID NO: 177391 - DNA, 25 bp, Saccharomyces pastorianus
ggaagaagtcttagccatggatgaa

SEQ ID NO: 177392 - DNA, 25 bp, Saccharomyces pastorianus
gttttacttggacaatccacctttg

SEQ ID NO: 177393 - DNA, 25 bp, Saccharomyces pastorianus
aaacgaagttgatgattttgcttct

SEQ ID NO: 177394 - DNA, 25 bp, Saccharomyces pastorianus
gacaatccacctttggcgacagtaa

SEQ ID NO: 177395 - DNA, 25 bp, Saccharomyces pastorianus
gatgattttgcttctaaaagggaaa

SEQ ID NO: 177396 - DNA, 25 bp, Saccharomyces pastorianus
aagttgatgattttgcttctaaaag

SEQ ID NO: 177397 - DNA, 25 bp, Saccharomyces pastorianus
ttggacaatccacctttggcgacag

SEQ ID NO: 177398 - DNA, 25 bp, Saccharomyces pastorianus
tgaggccgataaaattaaaaacacg

SEQ ID NO: 177399 - DNA, 25 bp, Saccharomyces pastorianus
gctaagtcttcctccagtaaaactg

SEQ ID NO: 177400 - DNA, 25 bp, Saccharomyces pastorianus
gcaatcaaggactacaaaacaaaga

SEQ ID NO: 177401 - DNA, 25 bp, Saccharomyces pastorianus
ttgttccatgcttgcagaagacgct

SEQ ID NO: 177402 - DNA, 25 bp, Saccharomyces pastorianus
gtcttcctccagtaaaactgcattg

SEQ ID NO: 177403 - DNA, 25 bp, Saccharomyces pastorianus
ttccatgcttgcagaagacgctatc

SEQ ID NO: 177404 - DNA, 25 bp, Saccharomyces pastorianus
gagctaagtcttcctccagtaaaac

SEQ ID NO: 177405 - DNA, 25 bp, Saccharomyces pastorianus
aaaactgcattgttccatgcttgca

SEQ ID NO: 177406 - DNA, 25 bp, Saccharomyces pastorianus
aaaacacggaaatcgcgaaggagct

SEQ ID NO: 177407 - DNA, 25 bp, Saccharomyces pastorianus
ggaaatcgcgaaggagctaagtctt

SEQ ID NO: 177408 - DNA, 25 bp, Saccharomyces pastorianus
gaaggagctaagtcttcctccagta

SEQ ID NO: 177409 - DNA, 25 bp, Saccharomyces pastorianus
ggttcagtctttgtagttcgagcga

SEQ ID NO: 177410 - DNA, 25 bp, Saccharomyces pastorianus
caagaatttataatggaacccaaag

SEQ ID NO: 177411 - DNA, 25 bp, Saccharomyces pastorianus
gaacccaaaggttcagtctttgtag

SEQ ID NO: 177412 - DNA, 25 bp, Saccharomyces pastorianus
gcgacattgcgcgtttccttagaaa

SEQ ID NO: 177413 - DNA, 25 bp, Saccharomyces pastorianus
tagttcgagcgacattgcgcgtttc

SEQ ID NO: 177414 - DNA, 25 bp, Saccharomyces pastorianus
tcgagcgacattgcgcgtttcctta

SEQ ID NO: 177415 - DNA, 25 bp, Saccharomyces pastorianus
tgtagttcgagcgacattgcgcgtt

SEQ ID NO: 177416 - DNA, 25 bp, Saccharomyces pastorianus
gtctttgtagttcgagcgacattgc

SEQ ID NO: 177417 - DNA, 25 bp, Saccharomyces pastorianus
aaggttcagtctttgtagttcgagc

SEQ ID NO: 177418 - DNA, 25 bp, Saccharomyces pastorianus
gacattgcgcgtttccttagaaaac

SEQ ID NO: 177419 - DNA, 25 bp, Saccharomyces pastorianus
tcagtctttgtagttcgagcgacat

SEQ ID NO: 177420 - DNA, 25 bp, Saccharomyces pastorianus
agatgaagtatcaggtaataattta

SEQ ID NO: 177421 - DNA, 25 bp, Saccharomyces pastorianus
acgtatactacatcgagaccaagaa

SEQ ID NO: 177422 - DNA, 25 bp, Saccharomyces pastorianus
catcgagaccaagaagaacattgct

SEQ ID NO: 177423 - DNA, 25 bp, Saccharomyces pastorianus
gtatactacatcgagaccaagaaga

SEQ ID NO: 177424 - DNA, 25 bp, Saccharomyces pastorianus
ctacatcgagaccaagaagaacatt

SEQ ID NO: 177425 - DNA, 25 bp, Saccharomyces pastorianus
atactacatcgagaccaagaagaac

SEQ ID NO: 177426 - DNA, 25 bp, Saccharomyces pastorianus
caggtaataatttatacgtatacta

SEQ ID NO: 177427 - DNA, 25 bp, Saccharomyces pastorianus
cgtatactacatcgagaccaagaag

SEQ ID NO: 177428 - DNA, 25 bp, Saccharomyces pastorianus
gaccaagaagaacattgctgatgtg

SEQ ID NO: 177429 - DNA, 25 bp, Saccharomyces pastorianus
atcaggtaataatttatacgtatac

SEQ ID NO: 177430 - DNA, 25 bp, Saccharomyces pastorianus
tactacatcgagaccaagaagaaca

SEQ ID NO: 177431 - DNA, 25 bp, Saccharomyces pastorianus
tattaaaacctgtggccatgtcttt

SEQ ID NO: 177432 - DNA, 25 bp, Saccharomyces pastorianus
attgttccctgtgttctaaaaattg

SEQ ID NO: 177433 - DNA, 25 bp, Saccharomyces pastorianus
gaagcacttcaagcagaaggcatct

SEQ ID NO: 177434 - DNA, 25 bp, Saccharomyces pastorianus
gtaaggaacgattggcagcgagaat

SEQ ID NO: 177435 - DNA, 25 bp, Saccharomyces pastorianus
gaaggcatctcatctagaatccaag

SEQ ID NO: 177436 - DNA, 25 bp, Saccharomyces pastorianus
ccgtacacttgtttattgttccctg

SEQ ID NO: 177437 - DNA, 25 bp, Saccharomyces pastorianus
ataagggctcgagcgatgaagcact

SEQ ID NO: 177438 - DNA, 25 bp, Saccharomyces pastorianus
acatgatacattgttccgtggtaac

SEQ ID NO: 177439 - DNA, 25 bp, Saccharomyces pastorianus
gaactagcaaatttccgtacacttg

SEQ ID NO: 177440 - DNA, 25 bp, Saccharomyces pastorianus
gagaaaatgccctacatgcaacaaa

SEQ ID NO: 177441 - DNA, 25 bp, Saccharomyces pastorianus
gaagcactcgtagaagaactagcaa

SEQ ID NO: 177442 - DNA, 25 bp, Saccharomyces pastorianus
gccaaaagcaatctgaccaatttgt

SEQ ID NO: 177443 - DNA, 25 bp, Saccharomyces pastorianus
aagcaatctgaccaatttgtatata

SEQ ID NO: 177444 - DNA, 25 bp, Saccharomyces pastorianus
gcaatctgaccaatttgtatatata

SEQ ID NO: 177445 - DNA, 25 bp, Saccharomyces pastorianus
aagggagccaaaagcaatctgacca

SEQ ID NO: 177446 - DNA, 25 bp, Saccharomyces pastorianus
gggagccaaaagcaatctgaccaat

SEQ ID NO: 177447 - DNA, 25 bp, Saccharomyces pastorianus
agggagccaaaagcaatctgaccaa

SEQ ID NO: 177448 - DNA, 25 bp, Saccharomyces pastorianus
ggagccaaaagcaatctgaccaatt

SEQ ID NO: 177449 - DNA, 25 bp, Saccharomyces pastorianus
aaaagcaatctgaccaatttgtata

SEQ ID NO: 177450 - DNA, 25 bp, Saccharomyces pastorianus
gaaagggagccaaaagcaatctgac

SEQ ID NO: 177451 - DNA, 25 bp, Saccharomyces pastorianus
gagccaaaagcaatctgaccaattt

SEQ ID NO: 177452 - DNA, 25 bp, Saccharomyces pastorianus
cgtacgaaagggagccaaaagcaat

SEQ ID NO: 177453 - DNA, 25 bp, Saccharomyces pastorianus
ggaggacgccattgagcaatttaac

SEQ ID NO: 177454 - DNA, 25 bp, Saccharomyces pastorianus
gtctaggctatgagtattacgttga

SEQ ID NO: 177455 - DNA, 25 bp, Saccharomyces pastorianus
gaggccatcacgtttgttgatgata

SEQ ID NO: 177456 - DNA, 25 bp, Saccharomyces pastorianus
caacttgaatcacatggaggacgga

SEQ ID NO: 177457 - DNA, 25 bp, Saccharomyces pastorianus
gaagccgactggttagatttatcaa

SEQ ID NO: 177458 - DNA, 25 bp, Saccharomyces pastorianus
aacgacgaagattttctgccctcta

SEQ ID NO: 177459 - DNA, 25 bp, Saccharomyces pastorianus
ggtgatatcataatttctacgagta

SEQ ID NO: 177460 - DNA, 25 bp, Saccharomyces pastorianus
atggatttgttagcggccagcgtag

SEQ ID NO: 177461 - DNA, 25 bp, Saccharomyces pastorianus
gaccaaagaggaggccatcacgttt

SEQ ID NO: 177462 - DNA, 25 bp, Saccharomyces pastorianus
gattttctgccctctatggagatta

SEQ ID NO: 177463 - DNA, 25 bp, Saccharomyces pastorianus
gagcaatttaacctgaagatcgaag

SEQ ID NO: 177464 - DNA, 25 bp, Saccharomyces pastorianus
aaggaattgaaacagcagtcggaga

SEQ ID NO: 177465 - DNA, 25 bp, Saccharomyces pastorianus
gaaagaaacccctaacgatgaagat

SEQ ID NO: 177466 - DNA, 25 bp, Saccharomyces pastorianus
agaagtcttcgaagatcacgatttt

SEQ ID NO: 177467 - DNA, 25 bp, Saccharomyces pastorianus
gatgataccgaaactcagggcacaa

SEQ ID NO: 177468 - DNA, 25 bp, Saccharomyces pastorianus
gttgaagacacctttacacctgatt

SEQ ID NO: 177469 - DNA, 25 bp, Saccharomyces pastorianus
gcttacttggcgtcagatagtgatg

SEQ ID NO: 177470 - DNA, 25 bp, Saccharomyces pastorianus
gaatgccaaatcaaaggctgaattg

SEQ ID NO: 177471 - DNA, 25 bp, Saccharomyces pastorianus
ttacacctgatttagaagatcctag

SEQ ID NO: 177472 - DNA, 25 bp, Saccharomyces pastorianus
ggctgaattggagcttttaatggat

SEQ ID NO: 177473 - DNA, 25 bp, Saccharomyces pastorianus
ttactccagccttggaaggaggaaa

SEQ ID NO: 177474 - DNA, 25 bp, Saccharomyces pastorianus
tggtgactttgggtttaattccaag

SEQ ID NO: 177475 - DNA, 25 bp, Saccharomyces pastorianus
actctcacattccactccatcaccc

SEQ ID NO: 177476 - DNA, 25 bp, Saccharomyces pastorianus
catcagtaccaaatgcactcgcatc

SEQ ID NO: 177477 - DNA, 25 bp, Saccharomyces pastorianus
tccatcacccatctctcaccatcag

SEQ ID NO: 177478 - DNA, 25 bp, Saccharomyces pastorianus
accatcagtaccaaatgcactcgca

SEQ ID NO: 177479 - DNA, 25 bp, Saccharomyces pastorianus
tctcaccatcagtaccaaatgcact

SEQ ID NO: 177480 - DNA, 25 bp, Saccharomyces pastorianus
tactctcacattccactccatcacc

SEQ ID NO: 177481 - DNA, 25 bp, Saccharomyces pastorianus
tcaccatcagtaccaaatgcactcg

SEQ ID NO: 177482 - DNA, 25 bp, Saccharomyces pastorianus
catcacccatctctcaccatcagta

SEQ ID NO: 177483 - DNA, 25 bp, Saccharomyces pastorianus
ccatcacccatctctcaccatcagt

SEQ ID NO: 177484 - DNA, 25 bp, Saccharomyces pastorianus
atctctcaccatcagtaccaaatgc

SEQ ID NO: 177485 - DNA, 25 bp, Saccharomyces pastorianus
catctctcaccatcagtaccaaatg

SEQ ID NO: 177486 - DNA, 25 bp, Saccharomyces pastorianus
tatcaaactcctcttcggttgtaga

SEQ ID NO: 177487 - DNA, 25 bp, Saccharomyces pastorianus
ccaggtgttaaatatgtccaagact

SEQ ID NO: 177488 - DNA, 25 bp, Saccharomyces pastorianus
gatgaggaaaattcaccaggtgtta

SEQ ID NO: 177489 - DNA, 25 bp, Saccharomyces pastorianus
ggtaaaatgcctatccaagtcagat

SEQ ID NO: 177490 - DNA, 25 bp, Saccharomyces pastorianus
ccttacattcatccttttccagaga

SEQ ID NO: 177491 - DNA, 25 bp, Saccharomyces pastorianus
aactcctcttcggttgtagatataa

SEQ ID NO: 177492 - DNA, 25 bp, Saccharomyces pastorianus
gattggttccgtaagggcaaaattg

SEQ ID NO: 177493 - DNA, 25 bp, Saccharomyces pastorianus
tcagtggttaaagcggagatatcta

SEQ ID NO: 177494 - DNA, 25 bp, Saccharomyces pastorianus
ggcaaaattgccttacattcatcct

SEQ ID NO: 177495 - DNA, 25 bp, Saccharomyces pastorianus
gtgtcggtctagcaccattattatc

SEQ ID NO: 177496 - DNA, 25 bp, Saccharomyces pastorianus
gatatgctggaagattggttccgta

SEQ ID NO: 177497 - DNA, 25 bp, Saccharomyces pastorianus
gattatgacggtaggattgccattt

SEQ ID NO: 177498 - DNA, 25 bp, Saccharomyces pastorianus
cagatggtgaattcgtccttggaac

SEQ ID NO: 177499 - DNA, 25 bp, Saccharomyces pastorianus
attccctgtgtttctcatgagacct

SEQ ID NO: 177500 - DNA, 25 bp, Saccharomyces pastorianus
gattgccatttggaatcattctgat

SEQ ID NO: 177501 - DNA, 25 bp, Saccharomyces pastorianus
agtaacaaagtattaaggccgcaag

SEQ ID NO: 177502 - DNA, 25 bp, Saccharomyces pastorianus
ctgcttgtttcacaccagatggtga

SEQ ID NO: 177503 - DNA, 25 bp, Saccharomyces pastorianus
gattctggatctgcttgtttcacac

SEQ ID NO: 177504 - DNA, 25 bp, Saccharomyces pastorianus
tattcgatgtttgttaccgcagacg

SEQ ID NO: 177505 - DNA, 25 bp, Saccharomyces pastorianus
gaatttctagattctggatctgctt

SEQ ID NO: 177506 - DNA, 25 bp, Saccharomyces pastorianus
ttcaaccctaaatattcgatgtttg

SEQ ID NO: 177507 - DNA, 25 bp, Saccharomyces pastorianus
aaggccgcaagggttcattccctgt

SEQ ID NO: 177508 - DNA, 25 bp, Saccharomyces pastorianus
attaccgaagttttaagagatcctg

SEQ ID NO: 177509 - DNA, 25 bp, Saccharomyces pastorianus
cgacattgatgagcgtgagacattc

SEQ ID NO: 177510 - DNA, 25 bp, Saccharomyces pastorianus
tacttattaccgataccgtactgaa

SEQ ID NO: 177511 - DNA, 25 bp, Saccharomyces pastorianus
gagacattcttggacttgacataca

SEQ ID NO: 177512 - DNA, 25 bp, Saccharomyces pastorianus
gctccccaggattctatgcaaaggc

SEQ ID NO: 177513 - DNA, 25 bp, Saccharomyces pastorianus
gattatactgtgctccccaggattc

SEQ ID NO: 177514 - DNA, 25 bp, Saccharomyces pastorianus
gagatcctgaatattctaccgtact

SEQ ID NO: 177515 - DNA, 25 bp, Saccharomyces pastorianus
agagcggcggaagagtatttgtatt

SEQ ID NO: 177516 - DNA, 25 bp, Saccharomyces pastorianus
gagatgtttattatcgcccattgtt

SEQ ID NO: 177517 - DNA, 25 bp, Saccharomyces pastorianus
cgcccattgttccactggttattta

SEQ ID NO: 177518 - DNA, 25 bp, Saccharomyces pastorianus
ttcagtactctacaaagtcatggtg

SEQ ID NO: 177519 - DNA, 25 bp, Saccharomyces pastorianus
cgtctcttctgggatgatatctcag

SEQ ID NO: 177520 - DNA, 25 bp, Saccharomyces pastorianus
aataagaccgtctcttctgggatga

SEQ ID NO: 177521 - DNA, 25 bp, Saccharomyces pastorianus
tttgatgttccccatagatgctcta

SEQ ID NO: 177522 - DNA, 25 bp, Saccharomyces pastorianus
agatatctaccatggaaggatcgat

SEQ ID NO: 177523 - DNA, 25 bp, Saccharomyces pastorianus
agatgctctaaagactcgagtacaa

SEQ ID NO: 177524 - DNA, 25 bp, Saccharomyces pastorianus
gaccgtctcttctgggatgatatct

SEQ ID NO: 177525 - DNA, 25 bp, Saccharomyces pastorianus
ggaaggatcgatggccctatggaaa

SEQ ID NO: 177526 - DNA, 25 bp, Saccharomyces pastorianus
gctgcaggtttgaataagaccgtct

SEQ ID NO: 177527 - DNA, 25 bp, Saccharomyces pastorianus
gatgttccccatagatgctctaaag

SEQ ID NO: 177528 - DNA, 25 bp, Saccharomyces pastorianus
agactcgagtacaagctgcaggttt

SEQ ID NO: 177529 - DNA, 25 bp, Saccharomyces pastorianus
tggccctatggaaaggtgttcaatc

SEQ ID NO: 177530 - DNA, 25 bp, Saccharomyces pastorianus
cattgagctgagattattcgaggaa

SEQ ID NO: 177531 - DNA, 25 bp, Saccharomyces pastorianus
ggcccgttgcaggatcttactatta

SEQ ID NO: 177532 - DNA, 25 bp, Saccharomyces pastorianus
ggcagggcccgttgcaggatcttac

SEQ ID NO: 177533 - DNA, 25 bp, Saccharomyces pastorianus
gaaactgctaaatacttttacgagg

SEQ ID NO: 177534 - DNA, 25 bp, Saccharomyces pastorianus
gtttacaatacgaggacgagccatt

SEQ ID NO: 177535 - DNA, 25 bp, Saccharomyces pastorianus
cggcagaaactatcagcagaaattg

SEQ ID NO: 177536 - DNA, 25 bp, Saccharomyces pastorianus
cgaggatttgaagctaccacgtact

SEQ ID NO: 177537 - DNA, 25 bp, Saccharomyces pastorianus
gaacattttctgacattgagctgag

SEQ ID NO: 177538 - DNA, 25 bp, Saccharomyces pastorianus
gaggacgagccattatcagaaactg

SEQ ID NO: 177539 - DNA, 25 bp, Saccharomyces pastorianus
gttaattctggtagaatcgcagatc

SEQ ID NO: 177540 - DNA, 25 bp, Saccharomyces pastorianus
tcactgtattgcacgagtggatact

SEQ ID NO: 177541 - DNA, 25 bp, Saccharomyces pastorianus
atatggcagattttgtctgttctca

SEQ ID NO: 177542 - DNA, 25 bp, Saccharomyces pastorianus
agtcgagtatatgtcaatattccat

SEQ ID NO: 177543 - DNA, 25 bp, Saccharomyces pastorianus
gagatcacaaatcccaggaatctat

SEQ ID NO: 177544 - DNA, 25 bp, Saccharomyces pastorianus
gaacgaagttcaattacaaatgctg

SEQ ID NO: 177545 - DNA, 25 bp, Saccharomyces pastorianus
atgctgaaacttttgcaggtggtta

SEQ ID NO: 177546 - DNA, 25 bp, Saccharomyces pastorianus
gtaccctcagtataacagtttcacg

SEQ ID NO: 177547 - DNA, 25 bp, Saccharomyces pastorianus
aaccttaatttggtgggacactctg

SEQ ID NO: 177548 - DNA, 25 bp, Saccharomyces pastorianus
ggaactgttggaagagtaccctcag

SEQ ID NO: 177549 - DNA, 25 bp, Saccharomyces pastorianus
tctgttctcaaagatgctcgggaag

SEQ ID NO: 177550 - DNA, 25 bp, Saccharomyces pastorianus
gggacactctgtcggagcaacattt

SEQ ID NO: 177551 - DNA, 25 bp, Saccharomyces pastorianus
atttttgttggatggcagatactca

SEQ ID NO: 177552 - DNA, 25 bp, Saccharomyces pastorianus
gaggacaatgtcaatgccgaagatg

SEQ ID NO: 177553 - DNA, 25 bp, Saccharomyces pastorianus
gtcattgggatcttttttctttgca

SEQ ID NO: 177554 - DNA, 25 bp, Saccharomyces pastorianus
gagattcagtctattctcgctgact

SEQ ID NO: 177555 - DNA, 25 bp, Saccharomyces pastorianus
ggtagcacaaaccttactcgcaaag

SEQ ID NO: 177556 - DNA, 25 bp, Saccharomyces pastorianus
gagactcggctaatagcgctcagaa

SEQ ID NO: 177557 - DNA, 25 bp, Saccharomyces pastorianus
gattccccaaaagtacagaagtcat

SEQ ID NO: 177558 - DNA, 25 bp, Saccharomyces pastorianus
aatcgcacaccttaccacaaagatg

SEQ ID NO: 177559 - DNA, 25 bp, Saccharomyces pastorianus
aaaggagccggccaagctaatcgca

SEQ ID NO: 177560 - DNA, 25 bp, Saccharomyces pastorianus
aacgggccaccaacgaaaatgagag

SEQ ID NO: 177561 - DNA, 25 bp, Saccharomyces pastorianus
ctcgctgacttgacgaagcaattca

SEQ ID NO: 177562 - DNA, 25 bp, Saccharomyces pastorianus
cttttttctttgcaatcgataggga

SEQ ID NO: 177563 - DNA, 25 bp, Saccharomyces pastorianus
tgaagccgcccacggatgtgataat

SEQ ID NO: 177564 - DNA, 25 bp, Saccharomyces pastorianus
aagccgcccacggatgtgataatgc

SEQ ID NO: 177565 - DNA, 25 bp, Saccharomyces pastorianus
aatggcagtaggtgaagccgcccac

SEQ ID NO: 177566 - DNA, 25 bp, Saccharomyces pastorianus
taatggcagtaggtgaagccgccca

SEQ ID NO: 177567 - DNA, 25 bp, Saccharomyces pastorianus
atggcagtaggtgaagccgcccacg

SEQ ID NO: 177568 - DNA, 25 bp, Saccharomyces pastorianus
gtgaagccgcccacggatgtgataa

SEQ ID NO: 177569 - DNA, 25 bp, Saccharomyces pastorianus
ccacggatgtgataatgcgttatac

SEQ ID NO: 177570 - DNA, 25 bp, Saccharomyces pastorianus
gcccacggatgtgataatgcgttat

SEQ ID NO: 177571 - DNA, 25 bp, Saccharomyces pastorianus
ccgcccacggatgtgataatgcgtt

SEQ ID NO: 177572 - DNA, 25 bp, Saccharomyces pastorianus
gccgcccacggatgtgataatgcgt

SEQ ID NO: 177573 - DNA, 25 bp, Saccharomyces pastorianus
gcagtaggtgaagccgcccacggat

SEQ ID NO: 177574 - DNA, 25 bp, Saccharomyces pastorianus
taccctgaattacgaacttgctaga

SEQ ID NO: 177575 - DNA, 25 bp, Saccharomyces pastorianus
gaaggccacaatttacatgatttat

SEQ ID NO: 177576 - DNA, 25 bp, Saccharomyces pastorianus
atttaagacgtttgagaaggccaca

SEQ ID NO: 177577 - DNA, 25 bp, Saccharomyces pastorianus
gaaaactctgaagatgctttgcata

SEQ ID NO: 177578 - DNA, 25 bp, Saccharomyces pastorianus
ttagggactctatctcacggtaacg

SEQ ID NO: 177579 - DNA, 25 bp, Saccharomyces pastorianus
ttactatatcgtgctaatttcctat

SEQ ID NO: 177580 - DNA, 25 bp, Saccharomyces pastorianus
ttttaagtgcgcctaccctgaatta

SEQ ID NO: 177581 - DNA, 25 bp, Saccharomyces pastorianus
gattttaacccaaccatagcttacg

SEQ ID NO: 177582 - DNA, 25 bp, Saccharomyces pastorianus
cacggtaacgattttgccttagagt

SEQ ID NO: 177583 - DNA, 25 bp, Saccharomyces pastorianus
tacgaaatcaaacaaagccgggaat

SEQ ID NO: 177584 - DNA, 25 bp, Saccharomyces pastorianus
atagcttacgtatggtttcattact

SEQ ID NO: 177585 - DNA, 25 bp, Saccharomyces pastorianus
acttgaaggcaccaacggacgatat

SEQ ID NO: 177586 - DNA, 25 bp, Saccharomyces pastorianus
aggcaccaacggacgatatagtaga

SEQ ID NO: 177587 - DNA, 25 bp, Saccharomyces pastorianus
gcaccaattttgtttgtggaaggta

SEQ ID NO: 177588 - DNA, 25 bp, Saccharomyces pastorianus
atgtctgctacactacaagctgaaa

SEQ ID NO: 177589 - DNA, 25 bp, Saccharomyces pastorianus
atactacttgaaggcaccaacggac

SEQ ID NO: 177590 - DNA, 25 bp, Saccharomyces pastorianus
gagtttttcaataatgcaccaattt

SEQ ID NO: 177591 - DNA, 25 bp, Saccharomyces pastorianus
aaatttgatgtttcacaatactact

SEQ ID NO: 177592 - DNA, 25 bp, Saccharomyces pastorianus
accaacggacgatatagtagatgct

SEQ ID NO: 177593 - DNA, 25 bp, Saccharomyces pastorianus
attcagtgagtttttcaataatgca

SEQ ID NO: 177594 - DNA, 25 bp, Saccharomyces pastorianus
aatgcaccaattttgtttgtggaag

SEQ ID NO: 177595 - DNA, 25 bp, Saccharomyces pastorianus
gtctgctacactacaagctgaaaaa

SEQ ID NO: 177596 - DNA, 25 bp, Saccharomyces pastorianus
ctacctcaagagcagcagtcggatt

SEQ ID NO: 177597 - DNA, 25 bp, Saccharomyces pastorianus
cagtttcaatcaccgcagtgggctt

SEQ ID NO: 177598 - DNA, 25 bp, Saccharomyces pastorianus
atggcgttgtgtgttgctgcccaaa

SEQ ID NO: 177599 - DNA, 25 bp, Saccharomyces pastorianus
agtgggcttcatcgctgatatttca

SEQ ID NO: 177600 - DNA, 25 bp, Saccharomyces pastorianus
gcgtgttcggtgatattgcttccaa

SEQ ID NO: 177601 - DNA, 25 bp, Saccharomyces pastorianus
gttgcagaagatcctcagctgtaca

SEQ ID NO: 177602 - DNA, 25 bp, Saccharomyces pastorianus
ggtactatattccagttcattgcac

SEQ ID NO: 177603 - DNA, 25 bp, Saccharomyces pastorianus
aagctctgttcccttatgttggtac

SEQ ID NO: 177604 - DNA, 25 bp, Saccharomyces pastorianus
gatgtttccagacggctcaatcaaa

SEQ ID NO: 177605 - DNA, 25 bp, Saccharomyces pastorianus
gtgctgattttattccctacttgaa

SEQ ID NO: 177606 - DNA, 25 bp, Saccharomyces pastorianus
taggagtggccaattgttcagtcaa

SEQ ID NO: 177607 - DNA, 25 bp, Saccharomyces pastorianus
agcgacaccagcagcgattgaagtt

SEQ ID NO: 177608 - DNA, 25 bp, Saccharomyces pastorianus
tagtgctgatgtaatcttaacaaga

SEQ ID NO: 177609 - DNA, 25 bp, Saccharomyces pastorianus
tggcagcgacaccagcagcgattga

SEQ ID NO: 177610 - DNA, 25 bp, Saccharomyces pastorianus
ttagtgctgatgtaatcttaacaag

SEQ ID NO: 177611 - DNA, 25 bp, Saccharomyces pastorianus
cagcgacaccagcagcgattgaagt

SEQ ID NO: 177612 - DNA, 25 bp, Saccharomyces pastorianus
atggcagcgacaccagcagcgattg

SEQ ID NO: 177613 - DNA, 25 bp, Saccharomyces pastorianus
gcgacaccagcagcgattgaagtta

SEQ ID NO: 177614 - DNA, 25 bp, Saccharomyces pastorianus
caccagcagcgattgaagttaattt

SEQ ID NO: 177615 - DNA, 25 bp, Saccharomyces pastorianus
gcagcgacaccagcagcgattgaag

SEQ ID NO: 177616 - DNA, 25 bp, Saccharomyces pastorianus
gttagtgctgatgtaatcttaacaa

SEQ ID NO: 177617 - DNA, 25 bp, Saccharomyces pastorianus
ggcagcgacaccagcagcgattgaa

SEQ ID NO: 177618 - DNA, 25 bp, Saccharomyces pastorianus
aaagttattccactcttgacgtgaa

SEQ ID NO: 177619 - DNA, 25 bp, Saccharomyces pastorianus
gaatgccacggtaggtaatttgatt

SEQ ID NO: 177620 - DNA, 25 bp, Saccharomyces pastorianus
gctggcgtaactttaatctactgta

SEQ ID NO: 177621 - DNA, 25 bp, Saccharomyces pastorianus
tgcttcgaagcatactagaccttta

SEQ ID NO: 177622 - DNA, 25 bp, Saccharomyces pastorianus
catacggtttttgtagctggcgtaa

SEQ ID NO: 177623 - DNA, 25 bp, Saccharomyces pastorianus
ggttagccaggaattttgacgatca

SEQ ID NO: 177624 - DNA, 25 bp, Saccharomyces pastorianus
tcgccaagcgtactgaacccaagaa

SEQ ID NO: 177625 - DNA, 25 bp, Saccharomyces pastorianus
gtgcaagtctcttttcgacgatgga

SEQ ID NO: 177626 - DNA, 25 bp, Saccharomyces pastorianus
aagctgctgcgggtcaaatttgtca

SEQ ID NO: 177627 - DNA, 25 bp, Saccharomyces pastorianus
ttaatggtcattctacaccagcagt

SEQ ID NO: 177628 - DNA, 25 bp, Saccharomyces pastorianus
ggctagtagtgtcgccaagcgtact

SEQ ID NO: 177629 - DNA, 25 bp, Saccharomyces pastorianus
atcatccttgataactccccagctt

SEQ ID NO: 177630 - DNA, 25 bp, Saccharomyces pastorianus
aacatgcaataccaatatcgtcctg

SEQ ID NO: 177631 - DNA, 25 bp, Saccharomyces pastorianus
ggttttcagatacccatgataacga

SEQ ID NO: 177632 - DNA, 25 bp, Saccharomyces pastorianus
gatacccatgataacgaactattag

SEQ ID NO: 177633 - DNA, 25 bp, Saccharomyces pastorianus
ttgataactccccagcttcttacat

SEQ ID NO: 177634 - DNA, 25 bp, Saccharomyces pastorianus
ataccaatatcgtcctggttttcag

SEQ ID NO: 177635 - DNA, 25 bp, Saccharomyces pastorianus
gtcctggttttcagatacccatgat

SEQ ID NO: 177636 - DNA, 25 bp, Saccharomyces pastorianus
tatcgtcctggttttcagataccca

SEQ ID NO: 177637 - DNA, 25 bp, Saccharomyces pastorianus
gaactattagatattattcctcttt

SEQ ID NO: 177638 - DNA, 25 bp, Saccharomyces pastorianus
ataactccccagcttcttacatctt

SEQ ID NO: 177639 - DNA, 25 bp, Saccharomyces pastorianus
aagacctttcagtgaaaacttcatt

SEQ ID NO: 177640 - DNA, 25 bp, Saccharomyces pastorianus
gttatctggctgttgaccacggaaa

SEQ ID NO: 177641 - DNA, 25 bp, Saccharomyces pastorianus
tatatcctgttaactattctcccct

SEQ ID NO: 177642 - DNA, 25 bp, Saccharomyces pastorianus
gctgcatatctgacaacttacttct

SEQ ID NO: 177643 - DNA, 25 bp, Saccharomyces pastorianus
ataggatcgttgtcactgggcactc

SEQ ID NO: 177644 - DNA, 25 bp, Saccharomyces pastorianus
tattctcccctttgcgttaaggaat

SEQ ID NO: 177645 - DNA, 25 bp, Saccharomyces pastorianus
aacgacggaggttgtccaccacata

SEQ ID NO: 177646 - DNA, 25 bp, Saccharomyces pastorianus
gtccaccacatattaacttctgcaa

SEQ ID NO: 177647 - DNA, 25 bp, Saccharomyces pastorianus
ggcaagctctatatcaagctgcata

SEQ ID NO: 177648 - DNA, 25 bp, Saccharomyces pastorianus
aattaggctcgggttatctggctgt

SEQ ID NO: 177649 - DNA, 25 bp, Saccharomyces pastorianus
tgttgttcattgttcgtccaacctg

SEQ ID NO: 177650 - DNA, 25 bp, Saccharomyces pastorianus
gaaactctcgggatggacgtcttta

SEQ ID NO: 177651 - DNA, 25 bp, Saccharomyces pastorianus
tactaatatcacgattattcctcat

SEQ ID NO: 177652 - DNA, 25 bp, Saccharomyces pastorianus
ctaatatcacgattattcctcattc

SEQ ID NO: 177653 - DNA, 25 bp, Saccharomyces pastorianus
tttactaatatcacgattattcctc

SEQ ID NO: 177654 - DNA, 25 bp, Saccharomyces pastorianus
tatatttctatttactaatatcacg

SEQ ID NO: 177655 - DNA, 25 bp, Saccharomyces pastorianus
atatcacgattattcctcattccgt

SEQ ID NO: 177656 - DNA, 25 bp, Saccharomyces pastorianus
taatatcacgattattcctcattcc

SEQ ID NO: 177657 - DNA, 25 bp, Saccharomyces pastorianus
ttactaatatcacgattattcctca

SEQ ID NO: 177658 - DNA, 25 bp, Saccharomyces pastorianus
actaatatcacgattattcctcatt

SEQ ID NO: 177659 - DNA, 25 bp, Saccharomyces pastorianus
atttactaatatcacgattattcct

SEQ ID NO: 177660 - DNA, 25 bp, Saccharomyces pastorianus
tatttactaatatcacgattattcc

SEQ ID NO: 177661 - DNA, 25 bp, Saccharomyces pastorianus
aatatcacgattattcctcattccg

SEQ ID NO: 177662 - DNA, 25 bp, Saccharomyces pastorianus
gacgacgactacgacgatggaaaca

SEQ ID NO: 177663 - DNA, 25 bp, Saccharomyces pastorianus
tgacgacgatagtatagataacgac

SEQ ID NO: 177664 - DNA, 25 bp, Saccharomyces pastorianus
gataggaaacaaccccacaaggctg

SEQ ID NO: 177665 - DNA, 25 bp, Saccharomyces pastorianus
gaagatgatgacgtttacaactata

SEQ ID NO: 177666 - DNA, 25 bp, Saccharomyces pastorianus
gatgagaacgggtccgtcattttac

SEQ ID NO: 177667 - DNA, 25 bp, Saccharomyces pastorianus
gtttacaactataacgacaacgacg

SEQ ID NO: 177668 - DNA, 25 bp, Saccharomyces pastorianus
gaaacaaccatatcccctttgaaga

SEQ ID NO: 177669 - DNA, 25 bp, Saccharomyces pastorianus
acaaccccacaaggctgaagatgaa

SEQ ID NO: 177670 - DNA, 25 bp, Saccharomyces pastorianus
gtcattttacaagacgacgactacg

SEQ ID NO: 177671 - DNA, 25 bp, Saccharomyces pastorianus
gatagtgatttggacgacgatgaga

SEQ ID NO: 177672 - DNA, 25 bp, Saccharomyces pastorianus
aaccatatcccctttgaagatgatg

SEQ ID NO: 177673 - DNA, 25 bp, Saccharomyces pastorianus
gacggaacagttgttggtgacatac

SEQ ID NO: 177674 - DNA, 25 bp, Saccharomyces pastorianus
cggtgccaagcagagatatcaagtt

SEQ ID NO: 177675 - DNA, 25 bp, Saccharomyces pastorianus
gttcaggaactgtaattcaaccaga

SEQ ID NO: 177676 - DNA, 25 bp, Saccharomyces pastorianus
taactttcttatactacggtgccaa

SEQ ID NO: 177677 - DNA, 25 bp, Saccharomyces pastorianus
atatgctgcgcaatacgctggattg

SEQ ID NO: 177678 - DNA, 25 bp, Saccharomyces pastorianus
atactatcacggaaggagttgtcaa

SEQ ID NO: 177679 - DNA, 25 bp, Saccharomyces pastorianus
ggagaccacccagattgttcaggaa

SEQ ID NO: 177680 - DNA, 25 bp, Saccharomyces pastorianus
acttctgattgcaacgaactctgga

SEQ ID NO: 177681 - DNA, 25 bp, Saccharomyces pastorianus
tacgctggattgcaaacgcttttgg

SEQ ID NO: 177682 - DNA, 25 bp, Saccharomyces pastorianus
gataggttcttcgattacaccaaca

SEQ ID NO: 177683 - DNA, 25 bp, Saccharomyces pastorianus
aaggtattccaaaggcccattccat

SEQ ID NO: 177684 - DNA, 25 bp, Saccharomyces pastorianus
ttcatagtgagggcttcgagcgcga

SEQ ID NO: 177685 - DNA, 25 bp, Saccharomyces pastorianus
ctgccgttcatagtgagggcttcga

SEQ ID NO: 177686 - DNA, 25 bp, Saccharomyces pastorianus
attgccgccaagctggcgctgccgt

SEQ ID NO: 177687 - DNA, 25 bp, Saccharomyces pastorianus
aggattgccgccaagctggcgctgc

SEQ ID NO: 177688 - DNA, 25 bp, Saccharomyces pastorianus
caagctggcgctgccgttcatagtg

SEQ ID NO: 177689 - DNA, 25 bp, Saccharomyces pastorianus
gctgccgttcatagtgagggcttcg

SEQ ID NO: 177690 - DNA, 25 bp, Saccharomyces pastorianus
gcgctgccgttcatagtgagggctt

SEQ ID NO: 177691 - DNA, 25 bp, Saccharomyces pastorianus
cgttcatagtgagggcttcgagcgc

SEQ ID NO: 177692 - DNA, 25 bp, Saccharomyces pastorianus
tgccgttcatagtgagggcttcgag

SEQ ID NO: 177693 - DNA, 25 bp, Saccharomyces pastorianus
gccaagctggcgctgccgttcatag

SEQ ID NO: 177694 - DNA, 25 bp, Saccharomyces pastorianus
cgctgccgttcatagtgagggcttc

SEQ ID NO: 177695 - DNA, 25 bp, Saccharomyces pastorianus
ttccgctgacttgggagtagagtac

SEQ ID NO: 177696 - DNA, 25 bp, Saccharomyces pastorianus
cggagtcgcgtattacaaatcttgt

SEQ ID NO: 177697 - DNA, 25 bp, Saccharomyces pastorianus
gagtcgcgtattacaaatcttgtac

SEQ ID NO: 177698 - DNA, 25 bp, Saccharomyces pastorianus
ttttccgctgacttgggagtagagt

SEQ ID NO: 177699 - DNA, 25 bp, Saccharomyces pastorianus
gctgcgcggagtcgcgtattacaaa

SEQ ID NO: 177700 - DNA, 25 bp, Saccharomyces pastorianus
cgcggagtcgcgtattacaaatctt

SEQ ID NO: 177701 - DNA, 25 bp, Saccharomyces pastorianus
aaatcttgtactttgcattctgtgc

SEQ ID NO: 177702 - DNA, 25 bp, Saccharomyces pastorianus
acttgggagtagagtacagctgcgc

SEQ ID NO: 177703 - DNA, 25 bp, Saccharomyces pastorianus
cagctgcgcggagtcgcgtattaca

SEQ ID NO: 177704 - DNA, 25 bp, Saccharomyces pastorianus
tacagctgcgcggagtcgcgtatta

SEQ ID NO: 177705 - DNA, 25 bp, Saccharomyces pastorianus
gtcgcgtattacaaatcttgtactt

SEQ ID NO: 177706 - DNA, 25 bp, Saccharomyces pastorianus
gctggcacagtggaactgatagaaa

SEQ ID NO: 177707 - DNA, 25 bp, Saccharomyces pastorianus
gtctgctggcacagtggaactgata

SEQ ID NO: 177708 - DNA, 25 bp, Saccharomyces pastorianus
ctgtctgctggcacagtggaactga

SEQ ID NO: 177709 - DNA, 25 bp, Saccharomyces pastorianus
cagacctgtctgctggcacagtgga

SEQ ID NO: 177710 - DNA, 25 bp, Saccharomyces pastorianus
tgtctgctggcacagtggaactgat

SEQ ID NO: 177711 - DNA, 25 bp, Saccharomyces pastorianus
cctgtctgctggcacagtggaactg

SEQ ID NO: 177712 - DNA, 25 bp, Saccharomyces pastorianus
tctgctggcacagtggaactgatag

SEQ ID NO: 177713 - DNA, 25 bp, Saccharomyces pastorianus
ctgctggcacagtggaactgataga

SEQ ID NO: 177714 - DNA, 25 bp, Saccharomyces pastorianus
acctgtctgctggcacagtggaact

SEQ ID NO: 177715 - DNA, 25 bp, Saccharomyces pastorianus
agacctgtctgctggcacagtggaa

SEQ ID NO: 177716 - DNA, 25 bp, Saccharomyces pastorianus
gacctgtctgctggcacagtggaac

SEQ ID NO: 177717 - DNA, 25 bp, Saccharomyces pastorianus
agccaagaggtttgaactccgctag

SEQ ID NO: 177718 - DNA, 25 bp, Saccharomyces pastorianus
gccaagaggtttgaactccgctaga

SEQ ID NO: 177719 - DNA, 25 bp, Saccharomyces pastorianus
ccaagaggtttgaactccgctagaa

SEQ ID NO: 177720 - DNA, 25 bp, Saccharomyces pastorianus
ggtaagccaagaggtttgaactccg

SEQ ID NO: 177721 - DNA, 25 bp, Saccharomyces pastorianus
aagaggtttgaactccgctagaaag

SEQ ID NO: 177722 - DNA, 25 bp, Saccharomyces pastorianus
aagccaagaggtttgaactccgcta

SEQ ID NO: 177723 - DNA, 25 bp, Saccharomyces pastorianus
gtaagccaagaggtttgaactccgc

SEQ ID NO: 177724 - DNA, 25 bp, Saccharomyces pastorianus
caagaggtttgaactccgctagaaa

SEQ ID NO: 177725 - DNA, 25 bp, Saccharomyces pastorianus
taagccaagaggtttgaactccgct

SEQ ID NO: 177726 - DNA, 25 bp, Saccharomyces pastorianus
tctagcgggatcgaaccgctgatcc

SEQ ID NO: 177727 - DNA, 25 bp, Saccharomyces pastorianus
cgaaccgctgatccccgcgttatta

SEQ ID NO: 177728 - DNA, 25 bp, Saccharomyces pastorianus
atggtctctagcgggatcgaaccgc

SEQ ID NO: 177729 - DNA, 25 bp, Saccharomyces pastorianus
gtctctagcgggatcgaaccgctga

SEQ ID NO: 177730 - DNA, 25 bp, Saccharomyces pastorianus
tctctagcgggatcgaaccgctgat

SEQ ID NO: 177731 - DNA, 25 bp, Saccharomyces pastorianus
ctctagcgggatcgaaccgctgatc

SEQ ID NO: 177732 - DNA, 25 bp, Saccharomyces pastorianus
ggtctctagcgggatcgaaccgctg

SEQ ID NO: 177733 - DNA, 25 bp, Saccharomyces pastorianus
ggatcgaaccgctgatccccgcgtt

SEQ ID NO: 177734 - DNA, 25 bp, Saccharomyces pastorianus
tagcgggatcgaaccgctgatcccc

SEQ ID NO: 177735 - DNA, 25 bp, Saccharomyces pastorianus
atcgaaccgctgatccccgcgttat

SEQ ID NO: 177736 - DNA, 25 bp, Saccharomyces pastorianus
gctgatccccgcgttattagcacgg

SEQ ID NO: 177737 - DNA, 25 bp, Saccharomyces pastorianus
aatagaacagatttatcaaaaagag

SEQ ID NO: 177738 - DNA, 25 bp, Saccharomyces pastorianus
gtaatagaacagatttatcaaaaag

SEQ ID NO: 177739 - DNA, 25 bp, Saccharomyces pastorianus
atgaagcagaaaaaatttaactcca

SEQ ID NO: 177740 - DNA, 25 bp, Saccharomyces pastorianus
aaaagtaatagaacagatttatcaa

SEQ ID NO: 177741 - DNA, 25 bp, Saccharomyces pastorianus
atagaacagatttatcaaaaagagg

SEQ ID NO: 177742 - DNA, 25 bp, Saccharomyces pastorianus
tgaagcagaaaaaatttaactccaa

SEQ ID NO: 177743 - DNA, 25 bp, Saccharomyces pastorianus
tagaacagatttatcaaaaagagga

SEQ ID NO: 177744 - DNA, 25 bp, Saccharomyces pastorianus
aagtaatagaacagatttatcaaaa

SEQ ID NO: 177745 - DNA, 25 bp, Saccharomyces pastorianus
aaagtaatagaacagatttatcaaa

SEQ ID NO: 177746 - DNA, 25 bp, Saccharomyces pastorianus
agggtactcgagttcgggacctgat

SEQ ID NO: 177747 - DNA, 25 bp, Saccharomyces pastorianus
cctggttcgtatcttgcgtggaatt

SEQ ID NO: 177748 - DNA, 25 bp, Saccharomyces pastorianus
gctacgacctctgaagggtactcga

SEQ ID NO: 177749 - DNA, 25 bp, Saccharomyces pastorianus
ggaattcgtgactcggatactacca

SEQ ID NO: 177750 - DNA, 25 bp, Saccharomyces pastorianus
gttcgggacctgatagaatttattc

SEQ ID NO: 177751 - DNA, 25 bp, Saccharomyces pastorianus
gggtaatgtacattcaccagataat

SEQ ID NO: 177752 - DNA, 25 bp, Saccharomyces pastorianus
tcggatactaccatcacagcaggaa

SEQ ID NO: 177753 - DNA, 25 bp, Saccharomyces pastorianus
atcttgcgtggaattcgtgactcgg

SEQ ID NO: 177754 - DNA, 25 bp, Saccharomyces pastorianus
atttattctgcaaagggtaatgtac

SEQ ID NO: 177755 - DNA, 25 bp, Saccharomyces pastorianus
gcaggaaacagctacgacctctgaa

SEQ ID NO: 177756 - DNA, 25 bp, Saccharomyces pastorianus
ttcttcctctacttcctggttcgta

SEQ ID NO: 177757 - DNA, 25 bp, Saccharomyces pastorianus
aagttttgttcagagaaccgaagcg

SEQ ID NO: 177758 - DNA, 25 bp, Saccharomyces pastorianus
gttcagagaaccgaagcgaggaatt

SEQ ID NO: 177759 - DNA, 25 bp, Saccharomyces pastorianus
caacctcattttgcgtaatcgagaa

SEQ ID NO: 177760 - DNA, 25 bp, Saccharomyces pastorianus
agttttgttcagagaaccgaagcga

SEQ ID NO: 177761 - DNA, 25 bp, Saccharomyces pastorianus
acctcattttgcgtaatcgagaagt

SEQ ID NO: 177762 - DNA, 25 bp, Saccharomyces pastorianus
aacctcattttgcgtaatcgagaag

SEQ ID NO: 177763 - DNA, 25 bp, Saccharomyces pastorianus
tgccaacctcattttgcgtaatcga

SEQ ID NO: 177764 - DNA, 25 bp, Saccharomyces pastorianus
ttgccaacctcattttgcgtaatcg

SEQ ID NO: 177765 - DNA, 25 bp, Saccharomyces pastorianus
cagagaaccgaagcgaggaattgac

SEQ ID NO: 177766 - DNA, 25 bp, Saccharomyces pastorianus
ttgttcagagaaccgaagcgaggaa

SEQ ID NO: 177767 - DNA, 25 bp, Saccharomyces pastorianus
gccaacctcattttgcgtaatcgag

SEQ ID NO: 177768 - DNA, 25 bp, Saccharomyces pastorianus
tgtataaatgcccttgatacatacg

SEQ ID NO: 177769 - DNA, 25 bp, Saccharomyces pastorianus
ataaatgcccttgatacatacgtta

SEQ ID NO: 177770 - DNA, 25 bp, Saccharomyces pastorianus
taaatgcccttgatacatacgttat

SEQ ID NO: 177771 - DNA, 25 bp, Saccharomyces pastorianus
aaatgcccttgatacatacgttata

SEQ ID NO: 177772 - DNA, 25 bp, Saccharomyces pastorianus
caaatattgtataaatgcccttgat

SEQ ID NO: 177773 - DNA, 25 bp, Saccharomyces pastorianus
ccaaatattgtataaatgcccttga

SEQ ID NO: 177774 - DNA, 25 bp, Saccharomyces pastorianus
gtataaatgcccttgatacatacgt

SEQ ID NO: 177775 - DNA, 25 bp, Saccharomyces pastorianus
tataaatgcccttgatacatacgtt

SEQ ID NO: 177776 - DNA, 25 bp, Saccharomyces pastorianus
aatattgtataaatgcccttgatac

SEQ ID NO: 177777 - DNA, 25 bp, Saccharomyces pastorianus
aaatattgtataaatgcccttgata

SEQ ID NO: 177778 - DNA, 25 bp, Saccharomyces pastorianus
aatgcccttgatacatacgttatac

SEQ ID NO: 177779 - DNA, 25 bp, Saccharomyces pastorianus
aatcatctaccgcatggataagtgt

SEQ ID NO: 177780 - DNA, 25 bp, Saccharomyces pastorianus
ggtttgcgattatttttactcaggt

SEQ ID NO: 177781 - DNA, 25 bp, Saccharomyces pastorianus
gcagaacgatatttgtcgccgagat

SEQ ID NO: 177782 - DNA, 25 bp, Saccharomyces pastorianus
ttatgctgcaatgttttggttgggc

SEQ ID NO: 177783 - DNA, 25 bp, Saccharomyces pastorianus
taaattacactctcgttggtttgcg

SEQ ID NO: 177784 - DNA, 25 bp, Saccharomyces pastorianus
gtttatttgatgcttactggtgtta

SEQ ID NO: 177785 - DNA, 25 bp, Saccharomyces pastorianus
tggctcctgttttatactcttggca

SEQ ID NO: 177786 - DNA, 25 bp, Saccharomyces pastorianus
ttactcaggttttcaatatcattgg

SEQ ID NO: 177787 - DNA, 25 bp, Saccharomyces pastorianus
tttgtcgccgagatgctcaaactag

SEQ ID NO: 177788 - DNA, 25 bp, Saccharomyces pastorianus
ttgggctatggctcctgttttatac

SEQ ID NO: 177789 - DNA, 25 bp, Saccharomyces pastorianus
atatcattggtaactccatattagc

SEQ ID NO: 177790 - DNA, 25 bp, Saccharomyces pastorianus
atgagcggtacgagaatcgaacccg

SEQ ID NO: 177791 - DNA, 25 bp, Saccharomyces pastorianus
atttctaaaaatgagcggtacgaga

SEQ ID NO: 177792 - DNA, 25 bp, Saccharomyces pastorianus
gaatttctaaaaatgagcggtacga

SEQ ID NO: 177793 - DNA, 25 bp, Saccharomyces pastorianus
tacgagaatcgaacccgtgtcccca

SEQ ID NO: 177794 - DNA, 25 bp, Saccharomyces pastorianus
taaaaatgagcggtacgagaatcga

SEQ ID NO: 177795 - DNA, 25 bp, Saccharomyces pastorianus
aatgagcggtacgagaatcgaaccc

SEQ ID NO: 177796 - DNA, 25 bp, Saccharomyces pastorianus
tttctaaaaatgagcggtacgagaa

SEQ ID NO: 177797 - DNA, 25 bp, Saccharomyces pastorianus
aaaatgagcggtacgagaatcgaac

SEQ ID NO: 177798 - DNA, 25 bp, Saccharomyces pastorianus
aatttctaaaaatgagcggtacgag

SEQ ID NO: 177799 - DNA, 25 bp, Saccharomyces pastorianus
agaatttctaaaaatgagcggtacg

SEQ ID NO: 177800 - DNA, 25 bp, Saccharomyces pastorianus
gcggtacgagaatcgaacccgtgtc

SEQ ID NO: 177801 - DNA, 25 bp, Saccharomyces pastorianus
atttctctggcgctgggtgtatttg

SEQ ID NO: 177802 - DNA, 25 bp, Saccharomyces pastorianus
ttagagaggtgccaacagcccattc

SEQ ID NO: 177803 - DNA, 25 bp, Saccharomyces pastorianus
atttagccccgtcacatacaaatct

SEQ ID NO: 177804 - DNA, 25 bp, Saccharomyces pastorianus
ggtgtcatcggccattatagagcta

SEQ ID NO: 177805 - DNA, 25 bp, Saccharomyces pastorianus
aaatctctatggtgggttgactatt

SEQ ID NO: 177806 - DNA, 25 bp, Saccharomyces pastorianus
gactgatcttcattatgctgcaacg

SEQ ID NO: 177807 - DNA, 25 bp, Saccharomyces pastorianus
cacactttttggcatttcttcgtag

SEQ ID NO: 177808 - DNA, 25 bp, Saccharomyces pastorianus
tgtccgtctcatgccaaatcattta

SEQ ID NO: 177809 - DNA, 25 bp, Saccharomyces pastorianus
agcccattccaaatgcagttcctgt

SEQ ID NO: 177810 - DNA, 25 bp, Saccharomyces pastorianus
gtattttacggttcgttcattcctg

SEQ ID NO: 177811 - DNA, 25 bp, Saccharomyces pastorianus
tttcttcgtagtgttgggtgtcatc

SEQ ID NO: 177812 - DNA, 25 bp, Saccharomyces pastorianus
aacgccggtcattttccataatttg

SEQ ID NO: 177813 - DNA, 25 bp, Saccharomyces pastorianus
gccggtcattttccataatttgatc

SEQ ID NO: 177814 - DNA, 25 bp, Saccharomyces pastorianus
ataacgccggtcattttccataatt

SEQ ID NO: 177815 - DNA, 25 bp, Saccharomyces pastorianus
caataacttcagcaaacgagcagat

SEQ ID NO: 177816 - DNA, 25 bp, Saccharomyces pastorianus
acgagcagataacgccggtcatttt

SEQ ID NO: 177817 - DNA, 25 bp, Saccharomyces pastorianus
aaacgagcagataacgccggtcatt

SEQ ID NO: 177818 - DNA, 25 bp, Saccharomyces pastorianus
ggtcattttccataatttgatcatg

SEQ ID NO: 177819 - DNA, 25 bp, Saccharomyces pastorianus
tgtttccagccgttccagaaaaacg

SEQ ID NO: 177820 - DNA, 25 bp, Saccharomyces pastorianus
cagataacgccggtcattttccata

SEQ ID NO: 177821 - DNA, 25 bp, Saccharomyces pastorianus
tttgatcatggatatggtactaccc

SEQ ID NO: 177822 - DNA, 25 bp, Saccharomyces pastorianus
aaaactatggtacaataacttcagc

SEQ ID NO: 177823 - DNA, 25 bp, Saccharomyces pastorianus
attctcaaaagcatacagttgaagc

SEQ ID NO: 177824 - DNA, 25 bp, Saccharomyces pastorianus
agacatattctcaaaagcatacagt

SEQ ID NO: 177825 - DNA, 25 bp, Saccharomyces pastorianus
gaaaacagacatattctcaaaagca

SEQ ID NO: 177826 - DNA, 25 bp, Saccharomyces pastorianus
aaaacagacatattctcaaaagcat

SEQ ID NO: 177827 - DNA, 25 bp, Saccharomyces pastorianus
cagacatattctcaaaagcatacag

SEQ ID NO: 177828 - DNA, 25 bp, Saccharomyces pastorianus
acatattctcaaaagcatacagttg

SEQ ID NO: 177829 - DNA, 25 bp, Saccharomyces pastorianus
ggaaaggaaagaaaacagacatatt

SEQ ID NO: 177830 - DNA, 25 bp, Saccharomyces pastorianus
aacagacatattctcaaaagcatac

SEQ ID NO: 177831 - DNA, 25 bp, Saccharomyces pastorianus
gacatattctcaaaagcatacagtt

SEQ ID NO: 177832 - DNA, 25 bp, Saccharomyces pastorianus
aaacagacatattctcaaaagcata

SEQ ID NO: 177833 - DNA, 25 bp, Saccharomyces pastorianus
acagacatattctcaaaagcataca

SEQ ID NO: 177834 - DNA, 25 bp, Saccharomyces pastorianus
tgaatcttttgccatcaactccatc

SEQ ID NO: 177835 - DNA, 25 bp, Saccharomyces pastorianus
aaaacgaagtgcgatgccttcccta

SEQ ID NO: 177836 - DNA, 25 bp, Saccharomyces pastorianus
gatgagatctttggcttgtattccc

SEQ ID NO: 177837 - DNA, 25 bp, Saccharomyces pastorianus
ggcgctgattgccttatgctacagt

SEQ ID NO: 177838 - DNA, 25 bp, Saccharomyces pastorianus
aagtaacgtctaatcctatggtcaa

SEQ ID NO: 177839 - DNA, 25 bp, Saccharomyces pastorianus
cagtgtcatctgcaggaagtccgaa

SEQ ID NO: 177840 - DNA, 25 bp, Saccharomyces pastorianus
ttccaattcttatcgctccaaggta

SEQ ID NO: 177841 - DNA, 25 bp, Saccharomyces pastorianus
gtttccatcatctcaaccaaggttg

SEQ ID NO: 177842 - DNA, 25 bp, Saccharomyces pastorianus
ttacctcaaccctttgtgcaagaca

SEQ ID NO: 177843 - DNA, 25 bp, Saccharomyces pastorianus
ggtatcggtaaatgcttccttaatt

SEQ ID NO: 177844 - DNA, 25 bp, Saccharomyces pastorianus
accaaggttgcatatccatagccaa

SEQ ID NO: 177845 - DNA, 25 bp, Saccharomyces pastorianus
ctgactttgtttctggcacacctat

SEQ ID NO: 177846 - DNA, 25 bp, Saccharomyces pastorianus
tttcactgactttgtttctggcaca

SEQ ID NO: 177847 - DNA, 25 bp, Saccharomyces pastorianus
ctttcactgactttgtttctggcac

SEQ ID NO: 177848 - DNA, 25 bp, Saccharomyces pastorianus
ttcactgactttgtttctggcacac

SEQ ID NO: 177849 - DNA, 25 bp, Saccharomyces pastorianus
actttcactgactttgtttctggca

SEQ ID NO: 177850 - DNA, 25 bp, Saccharomyces pastorianus
tggcacacctattgtaaggagtctt

SEQ ID NO: 177851 - DNA, 25 bp, Saccharomyces pastorianus
gtttctggcacacctattgtaagga

SEQ ID NO: 177852 - DNA, 25 bp, Saccharomyces pastorianus
acacctattgtaaggagtcttcaga

SEQ ID NO: 177853 - DNA, 25 bp, Saccharomyces pastorianus
cactgactttgtttctggcacacct

SEQ ID NO: 177854 - DNA, 25 bp, Saccharomyces pastorianus
actgactttgtttctggcacaccta

SEQ ID NO: 177855 - DNA, 25 bp, Saccharomyces pastorianus
tcactgactttgtttctggcacacc

SEQ ID NO: 177856 - DNA, 25 bp, Saccharomyces pastorianus
atgaaacccttttccgtgcctgtat

SEQ ID NO: 177857 - DNA, 25 bp, Saccharomyces pastorianus
ggtgccgggtgccttatgaaaccct

SEQ ID NO: 177858 - DNA, 25 bp, Saccharomyces pastorianus
tatgaaacccttttccgtgcctgta

SEQ ID NO: 177859 - DNA, 25 bp, Saccharomyces pastorianus
ctgttttatggcgcttatgtgtatt

SEQ ID NO: 177860 - DNA, 25 bp, Saccharomyces pastorianus
tgaaacccttttccgtgcctgtatt

SEQ ID NO: 177861 - DNA, 25 bp, Saccharomyces pastorianus
tactgttttatggcgcttatgtgta

SEQ ID NO: 177862 - DNA, 25 bp, Saccharomyces pastorianus
gtgccgggtgccttatgaaaccctt

SEQ ID NO: 177863 - DNA, 25 bp, Saccharomyces pastorianus
tgcctgtatttccgttttcgtcgaa

SEQ ID NO: 177864 - DNA, 25 bp, Saccharomyces pastorianus
tgccgggtgccttatgaaacccttt

SEQ ID NO: 177865 - DNA, 25 bp, Saccharomyces pastorianus
gtactgttttatggcgcttatgtgt

SEQ ID NO: 177866 - DNA, 25 bp, Saccharomyces pastorianus
atcatacatctttgatagacttcgt

SEQ ID NO: 177867 - DNA, 25 bp, Saccharomyces pastorianus
ttggcgccggtgttaagcagaacat

SEQ ID NO: 177868 - DNA, 25 bp, Saccharomyces pastorianus
agtttggcgccggtgttaagcagaa

SEQ ID NO: 177869 - DNA, 25 bp, Saccharomyces pastorianus
gttaagcagaacatcttgtcttctt

SEQ ID NO: 177870 - DNA, 25 bp, Saccharomyces pastorianus
ggtgttaagcagaacatcttgtctt

SEQ ID NO: 177871 - DNA, 25 bp, Saccharomyces pastorianus
gcagaacatcttgtcttctttactt

SEQ ID NO: 177872 - DNA, 25 bp, Saccharomyces pastorianus
tttactttctgaggaatggcacgcg

SEQ ID NO: 177873 - DNA, 25 bp, Saccharomyces pastorianus
tattctcagtttggcgccggtgtta

SEQ ID NO: 177874 - DNA, 25 bp, Saccharomyces pastorianus
tactattctcagtttggcgccggtg

SEQ ID NO: 177875 - DNA, 25 bp, Saccharomyces pastorianus
tgtcttctttactttctgaggaatg

SEQ ID NO: 177876 - DNA, 25 bp, Saccharomyces pastorianus
gcgccggtgttaagcagaacatctt

SEQ ID NO: 177877 - DNA, 25 bp, Saccharomyces pastorianus
actttctgaggaatggcacgcggac

SEQ ID NO: 177878 - DNA, 25 bp, Saccharomyces pastorianus
gaagtaacaattcggcacgcatcct

SEQ ID NO: 177879 - DNA, 25 bp, Saccharomyces pastorianus
gaaagccctctgaaacgccaaaaat

SEQ ID NO: 177880 - DNA, 25 bp, Saccharomyces pastorianus
ttattacggaaagccctctgaaacg

SEQ ID NO: 177881 - DNA, 25 bp, Saccharomyces pastorianus
taaattcctttgaagattattacgg

SEQ ID NO: 177882 - DNA, 25 bp, Saccharomyces pastorianus
tacggaaagccctctgaaacgccaa

SEQ ID NO: 177883 - DNA, 25 bp, Saccharomyces pastorianus
agattattacggaaagccctctgaa

SEQ ID NO: 177884 - DNA, 25 bp, Saccharomyces pastorianus
gtaacaattcggcacgcatcctgtg

SEQ ID NO: 177885 - DNA, 25 bp, Saccharomyces pastorianus
aattcggcacgcatcctgtgcggaa

SEQ ID NO: 177886 - DNA, 25 bp, Saccharomyces pastorianus
agccctctgaaacgccaaaaatgga

SEQ ID NO: 177887 - DNA, 25 bp, Saccharomyces pastorianus
ctctgaaacgccaaaaatggaggaa

SEQ ID NO: 177888 - DNA, 25 bp, Saccharomyces pastorianus
ttggaagtaacaattcggcacgcat

SEQ ID NO: 177889 - DNA, 25 bp, Saccharomyces pastorianus
tacgttactagtatattatcatata

SEQ ID NO: 177890 - DNA, 25 bp, Saccharomyces pastorianus
ttacgttactagtatattatcatat

SEQ ID NO: 177891 - DNA, 25 bp, Saccharomyces pastorianus
tagtatttacgttactagtatatta

SEQ ID NO: 177892 - DNA, 25 bp, Saccharomyces pastorianus
atttacgttactagtatattatcat

SEQ ID NO: 177893 - DNA, 25 bp, Saccharomyces pastorianus
cgttactagtatattatcatatacg

SEQ ID NO: 177894 - DNA, 25 bp, Saccharomyces pastorianus
tatttacgttactagtatattatca

SEQ ID NO: 177895 - DNA, 25 bp, Saccharomyces pastorianus
tttacgttactagtatattatcata

SEQ ID NO: 177896 - DNA, 25 bp, Saccharomyces pastorianus
acgttactagtatattatcatatac

SEQ ID NO: 177897 - DNA, 25 bp, Saccharomyces pastorianus
agtatttacgttactagtatattat

SEQ ID NO: 177898 - DNA, 25 bp, Saccharomyces pastorianus
ctatcatctactaactagtatttac

SEQ ID NO: 177899 - DNA, 25 bp, Saccharomyces pastorianus
gtatttacgttactagtatattatc

SEQ ID NO: 177900 - DNA, 25 bp, Saccharomyces pastorianus
gagggaacttcatacaacgtcactt

SEQ ID NO: 177901 - DNA, 25 bp, Saccharomyces pastorianus
gactttccttggatagtttcctcga

SEQ ID NO: 177902 - DNA, 25 bp, Saccharomyces pastorianus
tttgattcattagctgccaactccg

SEQ ID NO: 177903 - DNA, 25 bp, Saccharomyces pastorianus
agaacactgtgatagtcggctgatc

SEQ ID NO: 177904 - DNA, 25 bp, Saccharomyces pastorianus
gaggctttgaacgttttgcacgata

SEQ ID NO: 177905 - DNA, 25 bp, Saccharomyces pastorianus
ttctatgaagttcacggccccggaa

SEQ ID NO: 177906 - DNA, 25 bp, Saccharomyces pastorianus
tgccaactccgtaaacgtttcttgt

SEQ ID NO: 177907 - DNA, 25 bp, Saccharomyces pastorianus
gcttggaagctagcgcctctaacaa

SEQ ID NO: 177908 - DNA, 25 bp, Saccharomyces pastorianus
taatgcgctcataccagtcaaaatt

SEQ ID NO: 177909 - DNA, 25 bp, Saccharomyces pastorianus
aaactgcccttatttctatacctat

SEQ ID NO: 177910 - DNA, 25 bp, Saccharomyces pastorianus
taccgctaaatgtcaaactgccctt

SEQ ID NO: 177911 - DNA, 25 bp, Saccharomyces pastorianus
gctaccgtgtccgtggcgtattcaa

SEQ ID NO: 177912 - DNA, 25 bp, Saccharomyces pastorianus
aaccattgttgtcaaggctgaaaag

SEQ ID NO: 177913 - DNA, 25 bp, Saccharomyces pastorianus
tggaggcggaagtttcagctaccgt

SEQ ID NO: 177914 - DNA, 25 bp, Saccharomyces pastorianus
gtccgtggcgtattcaaccattgtt

SEQ ID NO: 177915 - DNA, 25 bp, Saccharomyces pastorianus
gaactcattatcaattctatttgca

SEQ ID NO: 177916 - DNA, 25 bp, Saccharomyces pastorianus
aaaggcggatgcacgggcattgaac

SEQ ID NO: 177917 - DNA, 25 bp, Saccharomyces pastorianus
gtggcgtattcaaccattgttgtca

SEQ ID NO: 177918 - DNA, 25 bp, Saccharomyces pastorianus
ggcggaagtttcagctaccgtgtcc

SEQ ID NO: 177919 - DNA, 25 bp, Saccharomyces pastorianus
aagtttcagctaccgtgtccgtggc

SEQ ID NO: 177920 - DNA, 25 bp, Saccharomyces pastorianus
gtcaaggctgaaaaggcggatgcac

SEQ ID NO: 177921 - DNA, 25 bp, Saccharomyces pastorianus
ctgaaaaggcggatgcacgggcatt

SEQ ID NO: 177922 - DNA, 25 bp, Saccharomyces pastorianus
cgatctgatcaagtcaaattttgaa

SEQ ID NO: 177923 - DNA, 25 bp, Saccharomyces pastorianus
agacctcgaaaatttcagcttgtgg

SEQ ID NO: 177924 - DNA, 25 bp, Saccharomyces pastorianus
gaaacttttgacttgagagcctggt

SEQ ID NO: 177925 - DNA, 25 bp, Saccharomyces pastorianus
aaattgatggccgaagactatgaaa

SEQ ID NO: 177926 - DNA, 25 bp, Saccharomyces pastorianus
cttgagagcctggtcgagacaaaga

SEQ ID NO: 177927 - DNA, 25 bp, Saccharomyces pastorianus
cctcgaaaatttcagcttgtggaaa

SEQ ID NO: 177928 - DNA, 25 bp, Saccharomyces pastorianus
atggccgaagactatgaaacttttg

SEQ ID NO: 177929 - DNA, 25 bp, Saccharomyces pastorianus
gctattttaaattgatggccgaaga

SEQ ID NO: 177930 - DNA, 25 bp, Saccharomyces pastorianus
tgacttgagagcctggtcgagacaa

SEQ ID NO: 177931 - DNA, 25 bp, Saccharomyces pastorianus
acttttgacttgagagcctggtcga

SEQ ID NO: 177932 - DNA, 25 bp, Saccharomyces pastorianus
gagacaaagacctcgaaaatttcag

SEQ ID NO: 177933 - DNA, 25 bp, Saccharomyces pastorianus
gaaacatgcctcattgtgacgacct

SEQ ID NO: 177934 - DNA, 25 bp, Saccharomyces pastorianus
gcgagctagccacgaatattttaca

SEQ ID NO: 177935 - DNA, 25 bp, Saccharomyces pastorianus
ggcgacattgaaacatgcctcattg

SEQ ID NO: 177936 - DNA, 25 bp, Saccharomyces pastorianus
atatacaccacaatcgtgttggtag

SEQ ID NO: 177937 - DNA, 25 bp, Saccharomyces pastorianus
tatttaccaggtgtgtttgcccttg

SEQ ID NO: 177938 - DNA, 25 bp, Saccharomyces pastorianus
cacattgctctattccgcagattat

SEQ ID NO: 177939 - DNA, 25 bp, Saccharomyces pastorianus
taatgacactttaagcgagctagcc

SEQ ID NO: 177940 - DNA, 25 bp, Saccharomyces pastorianus
attccgcagattatttaccaggtgt

SEQ ID NO: 177941 - DNA, 25 bp, Saccharomyces pastorianus
gtgacgacctctctatttaatgaca

SEQ ID NO: 177942 - DNA, 25 bp, Saccharomyces pastorianus
gaagctggctattgccacattgctc

SEQ ID NO: 177943 - DNA, 25 bp, Saccharomyces pastorianus
gtttgcccttggtcaccaagtgaat

SEQ ID NO: 177944 - DNA, 25 bp, Saccharomyces pastorianus
gtgaagttgctagctcttctattgc

SEQ ID NO: 177945 - DNA, 25 bp, Saccharomyces pastorianus
tgctgccacatcttcaagtgaagtt

SEQ ID NO: 177946 - DNA, 25 bp, Saccharomyces pastorianus
ttgctagctcttctattgcttcatc

SEQ ID NO: 177947 - DNA, 25 bp, Saccharomyces pastorianus
gttaagaccaacattgccgactaca

SEQ ID NO: 177948 - DNA, 25 bp, Saccharomyces pastorianus
ttcatccactagctcttctgttgca

SEQ ID NO: 177949 - DNA, 25 bp, Saccharomyces pastorianus
ttccgttgcttcatcctcaagtgaa

SEQ ID NO: 177950 - DNA, 25 bp, Saccharomyces pastorianus
ttctctaactacctcaagttctgct

SEQ ID NO: 177951 - DNA, 25 bp, Saccharomyces pastorianus
aagttctgctgccacatcttcaagt

SEQ ID NO: 177952 - DNA, 25 bp, Saccharomyces pastorianus
tattgcttcatccactagctcttct

SEQ ID NO: 177953 - DNA, 25 bp, Saccharomyces pastorianus
aagaccaacattgccgactacatca

SEQ ID NO: 177954 - DNA, 25 bp, Saccharomyces pastorianus
gcaccattctcaagtgaagttgtca

SEQ ID NO: 177955 - DNA, 25 bp, Saccharomyces pastorianus
tgagtttcgcgtatggtcacccact

SEQ ID NO: 177956 - DNA, 25 bp, Saccharomyces pastorianus
atggtcacccactacactactcggt

SEQ ID NO: 177957 - DNA, 25 bp, Saccharomyces pastorianus
tcaggctcttaccagcttaactaca

SEQ ID NO: 177958 - DNA, 25 bp, Saccharomyces pastorianus
cacctgagtttcgcgtatggtcacc

SEQ ID NO: 177959 - DNA, 25 bp, Saccharomyces pastorianus
gtttcgcgtatggtcacccactaca

SEQ ID NO: 177960 - DNA, 25 bp, Saccharomyces pastorianus
gcacctgagtttcgcgtatggtcac

SEQ ID NO: 177961 - DNA, 25 bp, Saccharomyces pastorianus
tactcggtcaggctcttaccagctt

SEQ ID NO: 177962 - DNA, 25 bp, Saccharomyces pastorianus
acctgagtttcgcgtatggtcaccc

SEQ ID NO: 177963 - DNA, 25 bp, Saccharomyces pastorianus
cactacactactcggtcaggctctt

SEQ ID NO: 177964 - DNA, 25 bp, Saccharomyces pastorianus
ggtcaggctcttaccagcttaacta

SEQ ID NO: 177965 - DNA, 25 bp, Saccharomyces pastorianus
ctgagtttcgcgtatggtcacccac

SEQ ID NO: 177966 - DNA, 25 bp, Saccharomyces pastorianus
actgcactggacaaaggctggactt

SEQ ID NO: 177967 - DNA, 25 bp, Saccharomyces pastorianus
gtgggtgatgccttaaccaacctga

SEQ ID NO: 177968 - DNA, 25 bp, Saccharomyces pastorianus
ataacgtgggcgatgcaattactgc

SEQ ID NO: 177969 - DNA, 25 bp, Saccharomyces pastorianus
actacaggtacagtcagctcgccaa

SEQ ID NO: 177970 - DNA, 25 bp, Saccharomyces pastorianus
gactgatgccttgggcaacagcaca

SEQ ID NO: 177971 - DNA, 25 bp, Saccharomyces pastorianus
ggcacagcagccactgatgcagtaa

SEQ ID NO: 177972 - DNA, 25 bp, Saccharomyces pastorianus
gacagcctcaggttcgaactcgaat

SEQ ID NO: 177973 - DNA, 25 bp, Saccharomyces pastorianus
ttcaacttgcagatgcgcctgtatt

SEQ ID NO: 177974 - DNA, 25 bp, Saccharomyces pastorianus
gtaacagcggcagtgttgaccgtaa

SEQ ID NO: 177975 - DNA, 25 bp, Saccharomyces pastorianus
ttaccaatgttggtgcgggcacagc

SEQ ID NO: 177976 - DNA, 25 bp, Saccharomyces pastorianus
tatcacaggtggtctgacagcctca

SEQ ID NO: 177977 - DNA, 25 bp, Saccharomyces pastorianus
tgccttattaaaaatggaatcccaa

SEQ ID NO: 177978 - DNA, 25 bp, Saccharomyces pastorianus
tattgccttattaaaaatggaatcc

SEQ ID NO: 177979 - DNA, 25 bp, Saccharomyces pastorianus
ttgtgtagaattgcagattcccttt

SEQ ID NO: 177980 - DNA, 25 bp, Saccharomyces pastorianus
tctagtacattctacatacctaata

SEQ ID NO: 177981 - DNA, 25 bp, Saccharomyces pastorianus
aacttctagtacattctacatacct

SEQ ID NO: 177982 - DNA, 25 bp, Saccharomyces pastorianus
tatggattcctaaatcctcgaggag

SEQ ID NO: 177983 - DNA, 25 bp, Saccharomyces pastorianus
ctagtacattctacatacctaatat

SEQ ID NO: 177984 - DNA, 25 bp, Saccharomyces pastorianus
ttgccttattaaaaatggaatccca

SEQ ID NO: 177985 - DNA, 25 bp, Saccharomyces pastorianus
gattatccctctttctattttatat

SEQ ID NO: 177986 - DNA, 25 bp, Saccharomyces pastorianus
actaaaagttctccacgaggacata

SEQ ID NO: 177987 - DNA, 25 bp, Saccharomyces pastorianus
cgattatccctctttctattttata

SEQ ID NO: 177988 - DNA, 25 bp, Saccharomyces pastorianus
atccctctttctattttatatgttt

SEQ ID NO: 177989 - DNA, 25 bp, Saccharomyces pastorianus
aaagttctccacgaggacataggaa

SEQ ID NO: 177990 - DNA, 25 bp, Saccharomyces pastorianus
tacgattatccctctttctatttta

SEQ ID NO: 177991 - DNA, 25 bp, Saccharomyces pastorianus
cctctttctattttatatgtttcat

SEQ ID NO: 177992 - DNA, 25 bp, Saccharomyces pastorianus
ttacgattatccctctttctatttt

SEQ ID NO: 177993 - DNA, 25 bp, Saccharomyces pastorianus
acgattatccctctttctattttat

SEQ ID NO: 177994 - DNA, 25 bp, Saccharomyces pastorianus
tcctatcatattatcaatctttgca

SEQ ID NO: 177995 - DNA, 25 bp, Saccharomyces pastorianus
ttatccctctttctattttatatgt

SEQ ID NO: 177996 - DNA, 25 bp, Saccharomyces pastorianus
gcagatgactttaagacagcctctt

SEQ ID NO: 177997 - DNA, 25 bp, Saccharomyces pastorianus
agacaaaccctccatcgctattaag

SEQ ID NO: 177998 - DNA, 25 bp, Saccharomyces pastorianus
acaggtaatccttcaaatgccacgg

SEQ ID NO: 177999 - DNA, 25 bp, Saccharomyces pastorianus
aaatcttgttgcgacgatggcgact

SEQ ID NO: 178000 - DNA, 25 bp, Saccharomyces pastorianus
tgaaacttctttccaatcttctctc

SEQ ID NO: 178001 - DNA, 25 bp, Saccharomyces pastorianus
gaaaattagaagtccagcgcctggt

SEQ ID NO: 178002 - DNA, 25 bp, Saccharomyces pastorianus
atcttctctctaccttcaacaaaaa

SEQ ID NO: 178003 - DNA, 25 bp, Saccharomyces pastorianus
gctgtagaagaggttgtctccctaa

SEQ ID NO: 178004 - DNA, 25 bp, Saccharomyces pastorianus
aatgccacggatttcgattctgttt

SEQ ID NO: 178005 - DNA, 25 bp, Saccharomyces pastorianus
tctccctaaagggttggcctcataa

SEQ ID NO: 178006 - DNA, 25 bp, Saccharomyces pastorianus
gactgctgctcctgcaaaaagggta

SEQ ID NO: 178007 - DNA, 25 bp, Saccharomyces pastorianus
aatggaggtcgactctatcctgtca

SEQ ID NO: 178008 - DNA, 25 bp, Saccharomyces pastorianus
ggaccaggaggcatcggatcaccat

SEQ ID NO: 178009 - DNA, 25 bp, Saccharomyces pastorianus
gaaaggctaatcacaacaccaccag

SEQ ID NO: 178010 - DNA, 25 bp, Saccharomyces pastorianus
atggaaccgctatcaatacccaaaa

SEQ ID NO: 178011 - DNA, 25 bp, Saccharomyces pastorianus
gaaaccggacaatggccacatgaat

SEQ ID NO: 178012 - DNA, 25 bp, Saccharomyces pastorianus
ttgtgaggctcactaaccagttctc

SEQ ID NO: 178013 - DNA, 25 bp, Saccharomyces pastorianus
gtcggcacagcggtaatcaacagtc

SEQ ID NO: 178014 - DNA, 25 bp, Saccharomyces pastorianus
agttctctcccatggatgatcctaa

SEQ ID NO: 178015 - DNA, 25 bp, Saccharomyces pastorianus
gaatgacctcaatagcagcgaagtt

SEQ ID NO: 178016 - DNA, 25 bp, Saccharomyces pastorianus
agaagtttccggatcaccagtcggc

SEQ ID NO: 178017 - DNA, 25 bp, Saccharomyces pastorianus
ggatcaccatcaacagcaagaattt

SEQ ID NO: 178018 - DNA, 25 bp, Saccharomyces pastorianus
agaacttcaacccatccggtgggtg

SEQ ID NO: 178019 - DNA, 25 bp, Saccharomyces pastorianus
gatgatcagacgcaagggaagacca

SEQ ID NO: 178020 - DNA, 25 bp, Saccharomyces pastorianus
tcacactgatggtccgctacagatg

SEQ ID NO: 178021 - DNA, 25 bp, Saccharomyces pastorianus
gtgtactcacactgatggtccgcta

SEQ ID NO: 178022 - DNA, 25 bp, Saccharomyces pastorianus
gacgcaagggaagaccatcgaccac

SEQ ID NO: 178023 - DNA, 25 bp, Saccharomyces pastorianus
aacccatccggtgggtgcatgtgtg

SEQ ID NO: 178024 - DNA, 25 bp, Saccharomyces pastorianus
tggccattgtaaagagctgagaaga

SEQ ID NO: 178025 - DNA, 25 bp, Saccharomyces pastorianus
agaaccaagaacttcaacccatccg

SEQ ID NO: 178026 - DNA, 25 bp, Saccharomyces pastorianus
gtccgctacagatgatcagacgcaa

SEQ ID NO: 178027 - DNA, 25 bp, Saccharomyces pastorianus
acagggcggcgcagtgtactcacac

SEQ ID NO: 178028 - DNA, 25 bp, Saccharomyces pastorianus
gatggtccgctacagatgatcagac

SEQ ID NO: 178029 - DNA, 25 bp, Saccharomyces pastorianus
ttgaccccagaagatgcccaacttt

SEQ ID NO: 178030 - DNA, 25 bp, Saccharomyces pastorianus
tgaccccagaagatgcccaactttt

SEQ ID NO: 178031 - DNA, 25 bp, Saccharomyces pastorianus
tttgaccccagaagatgcccaactt

SEQ ID NO: 178032 - DNA, 25 bp, Saccharomyces pastorianus
gaagatgcccaacttttgttggcct

SEQ ID NO: 178033 - DNA, 25 bp, Saccharomyces pastorianus
atttgaccccagaagatgcccaact

SEQ ID NO: 178034 - DNA, 25 bp, Saccharomyces pastorianus
agatgcccaacttttgttggcctct

SEQ ID NO: 178035 - DNA, 25 bp, Saccharomyces pastorianus
atgcccaacttttgttggcctctaa

SEQ ID NO: 178036 - DNA, 25 bp, Saccharomyces pastorianus
tacttttgatttgaccccagaagat

SEQ ID NO: 178037 - DNA, 25 bp, Saccharomyces pastorianus
accccagaagatgcccaacttttgt

SEQ ID NO: 178038 - DNA, 25 bp, Saccharomyces pastorianus
tgcccaacttttgttggcctctaac

SEQ ID NO: 178039 - DNA, 25 bp, Saccharomyces pastorianus
gatttgaccccagaagatgcccaac

SEQ ID NO: 178040 - DNA, 25 bp, Saccharomyces pastorianus
tcgatacttctacataataatatta

SEQ ID NO: 178041 - DNA, 25 bp, Saccharomyces pastorianus
cataataatattacgattattcctc

SEQ ID NO: 178042 - DNA, 25 bp, Saccharomyces pastorianus
tacttctacataataatattacgat

SEQ ID NO: 178043 - DNA, 25 bp, Saccharomyces pastorianus
atacttctacataataatattacga

SEQ ID NO: 178044 - DNA, 25 bp, Saccharomyces pastorianus
cgatacttctacataataatattac

SEQ ID NO: 178045 - DNA, 25 bp, Saccharomyces pastorianus
atcgatacttctacataataatatt

SEQ ID NO: 178046 - DNA, 25 bp, Saccharomyces pastorianus
aatcgatacttctacataataatat

SEQ ID NO: 178047 - DNA, 25 bp, Saccharomyces pastorianus
gaatcgatacttctacataataata

SEQ ID NO: 178048 - DNA, 25 bp, Saccharomyces pastorianus
gatacttctacataataatattacg

SEQ ID NO: 178049 - DNA, 25 bp, Saccharomyces pastorianus
acttctacataataatattacgatt

SEQ ID NO: 178050 - DNA, 25 bp, Saccharomyces pastorianus
ggaatcgatacttctacataataat

SEQ ID NO: 178051 - DNA, 25 bp, Saccharomyces pastorianus
atgattcctgattcattgacgctga

SEQ ID NO: 178052 - DNA, 25 bp, Saccharomyces pastorianus
aatacgcaaatgaacgggccagatg

SEQ ID NO: 178053 - DNA, 25 bp, Saccharomyces pastorianus
atggcggtatctcgaagcagcctgc

SEQ ID NO: 178054 - DNA, 25 bp, Saccharomyces pastorianus
agaactatcgttcatttggtggtag

SEQ ID NO: 178055 - DNA, 25 bp, Saccharomyces pastorianus
gccgactcccagtacttgatggata

SEQ ID NO: 178056 - DNA, 25 bp, Saccharomyces pastorianus
aactggcatctatgtattccgccga

SEQ ID NO: 178057 - DNA, 25 bp, Saccharomyces pastorianus
ctgactatttcacgtttcctaagca

SEQ ID NO: 178058 - DNA, 25 bp, Saccharomyces pastorianus
ggttcaactcggagctcttctagaa

SEQ ID NO: 178059 - DNA, 25 bp, Saccharomyces pastorianus
aagcagcctgcgacaccaggttcaa

SEQ ID NO: 178060 - DNA, 25 bp, Saccharomyces pastorianus
tcctaagcaggagaatggcggtatc

SEQ ID NO: 178061 - DNA, 25 bp, Saccharomyces pastorianus
gccagcatctggaaatacgcaaatg

SEQ ID NO: 178062 - DNA, 25 bp, Saccharomyces pastorianus
aattattgttattcgcgactctcgt

SEQ ID NO: 178063 - DNA, 25 bp, Saccharomyces pastorianus
gtatatgggccgtttgtcgcaagaa

SEQ ID NO: 178064 - DNA, 25 bp, Saccharomyces pastorianus
gcgatatcgttgaagctacctttgc

SEQ ID NO: 178065 - DNA, 25 bp, Saccharomyces pastorianus
atcacaaacggtgccctaagttggt

SEQ ID NO: 178066 - DNA, 25 bp, Saccharomyces pastorianus
ggagccgacagcaacgagcttacaa

SEQ ID NO: 178067 - DNA, 25 bp, Saccharomyces pastorianus
actacacccgttcgctagaatgatt

SEQ ID NO: 178068 - DNA, 25 bp, Saccharomyces pastorianus
aaacctggcttactccgactgagaa

SEQ ID NO: 178069 - DNA, 25 bp, Saccharomyces pastorianus
gatcctgaactatttcttggcaagc

SEQ ID NO: 178070 - DNA, 25 bp, Saccharomyces pastorianus
tgttactagggaccttttccttcag

SEQ ID NO: 178071 - DNA, 25 bp, Saccharomyces pastorianus
tagcgtggccattcggctcaaatga

SEQ ID NO: 178072 - DNA, 25 bp, Saccharomyces pastorianus
aagctcgctaatgtcacgtcattgc

SEQ ID NO: 178073 - DNA, 25 bp, Saccharomyces pastorianus
tgtatataactatctattcgatgat

SEQ ID NO: 178074 - DNA, 25 bp, Saccharomyces pastorianus
aataccactacaatggatgatgtat

SEQ ID NO: 178075 - DNA, 25 bp, Saccharomyces pastorianus
gtcacctggttggacggaccaaact

SEQ ID NO: 178076 - DNA, 25 bp, Saccharomyces pastorianus
aacgcgtttggaatcactacaggga

SEQ ID NO: 178077 - DNA, 25 bp, Saccharomyces pastorianus
aaaaccactgtcacctggttggacg

SEQ ID NO: 178078 - DNA, 25 bp, Saccharomyces pastorianus
tgcgtataacgcgtttggaatcact

SEQ ID NO: 178079 - DNA, 25 bp, Saccharomyces pastorianus
ttggacggaccaaactgcgtataac

SEQ ID NO: 178080 - DNA, 25 bp, Saccharomyces pastorianus
gtttggaatcactacagggatgttt

SEQ ID NO: 178081 - DNA, 25 bp, Saccharomyces pastorianus
cagggatgtttaataccactacaat

SEQ ID NO: 178082 - DNA, 25 bp, Saccharomyces pastorianus
gaataatgaaatcacggctagtaaa

SEQ ID NO: 178083 - DNA, 25 bp, Saccharomyces pastorianus
aataattcaaaaccactgtcacctg

SEQ ID NO: 178084 - DNA, 25 bp, Saccharomyces pastorianus
gattacttgagtttcatatcgagtc

SEQ ID NO: 178085 - DNA, 25 bp, Saccharomyces pastorianus
gtggtatcctgaacttgttgagctt

SEQ ID NO: 178086 - DNA, 25 bp, Saccharomyces pastorianus
gaaaatgcccagtcaacatcgcact

SEQ ID NO: 178087 - DNA, 25 bp, Saccharomyces pastorianus
gtatcttagagatttggtttctgca

SEQ ID NO: 178088 - DNA, 25 bp, Saccharomyces pastorianus
gaatcattctatgggctgtttaatt

SEQ ID NO: 178089 - DNA, 25 bp, Saccharomyces pastorianus
ctcagagacaattagcaacggcgat

SEQ ID NO: 178090 - DNA, 25 bp, Saccharomyces pastorianus
aacatcgcactattgaatcattcta

SEQ ID NO: 178091 - DNA, 25 bp, Saccharomyces pastorianus
taattttcagattcctcagagacaa

SEQ ID NO: 178092 - DNA, 25 bp, Saccharomyces pastorianus
gagttagctgctttgaggaatacat

SEQ ID NO: 178093 - DNA, 25 bp, Saccharomyces pastorianus
tatcgagtcagggacgtggtatcct

SEQ ID NO: 178094 - DNA, 25 bp, Saccharomyces pastorianus
gtaatcatctacctgatttctctat

SEQ ID NO: 178095 - DNA, 25 bp, Saccharomyces pastorianus
ctaggaaataccatatccaacggaa

SEQ ID NO: 178096 - DNA, 25 bp, Saccharomyces pastorianus
ggttttcaataggtccagggcaact

SEQ ID NO: 178097 - DNA, 25 bp, Saccharomyces pastorianus
gaaataccatatccaacggaaatta

SEQ ID NO: 178098 - DNA, 25 bp, Saccharomyces pastorianus
ttttcaataggtccagggcaactag

SEQ ID NO: 178099 - DNA, 25 bp, Saccharomyces pastorianus
taaaagtgcgccatattcaaatgct

SEQ ID NO: 178100 - DNA, 25 bp, Saccharomyces pastorianus
tcaataggtccagggcaactaggaa

SEQ ID NO: 178101 - DNA, 25 bp, Saccharomyces pastorianus
gggcttgctttagtgtcggattatt

SEQ ID NO: 178102 - DNA, 25 bp, Saccharomyces pastorianus
gggcaactaggaaataccatatcca

SEQ ID NO: 178103 - DNA, 25 bp, Saccharomyces pastorianus
ggcttgctttagtgtcggattattt

SEQ ID NO: 178104 - DNA, 25 bp, Saccharomyces pastorianus
acggaaattaaaagtgcgccatatt

SEQ ID NO: 178105 - DNA, 25 bp, Saccharomyces pastorianus
gtccagggcaactaggaaataccat

SEQ ID NO: 178106 - DNA, 25 bp, Saccharomyces pastorianus
gaatttgaggtaattgttgggattc

SEQ ID NO: 178107 - DNA, 25 bp, Saccharomyces pastorianus
tgaatttgaggtaattgttgggatt

SEQ ID NO: 178108 - DNA, 25 bp, Saccharomyces pastorianus
tgaggtaattgttgggattccattt

SEQ ID NO: 178109 - DNA, 25 bp, Saccharomyces pastorianus
ttgaggtaattgttgggattccatt

SEQ ID NO: 178110 - DNA, 25 bp, Saccharomyces pastorianus
gtaattgttgggattccatttttga

SEQ ID NO: 178111 - DNA, 25 bp, Saccharomyces pastorianus
gaggtaattgttgggattccatttt

SEQ ID NO: 178112 - DNA, 25 bp, Saccharomyces pastorianus
tttgaggtaattgttgggattccat

SEQ ID NO: 178113 - DNA, 25 bp, Saccharomyces pastorianus
aattgttgggattccatttttgata

SEQ ID NO: 178114 - DNA, 25 bp, Saccharomyces pastorianus
ggtaattgttgggattccatttttg

SEQ ID NO: 178115 - DNA, 25 bp, Saccharomyces pastorianus
taattgttgggattccatttttgat

SEQ ID NO: 178116 - DNA, 25 bp, Saccharomyces pastorianus
atttgaggtaattgttgggattcca

SEQ ID NO: 178117 - DNA, 25 bp, Saccharomyces pastorianus
gacttatttcgtcacttggtataca

SEQ ID NO: 178118 - DNA, 25 bp, Saccharomyces pastorianus
gagaattctgatacagtcgctgata

SEQ ID NO: 178119 - DNA, 25 bp, Saccharomyces pastorianus
agtgaaccattctgtacacctcgtg

SEQ ID NO: 178120 - DNA, 25 bp, Saccharomyces pastorianus
ttgacaatgtcgatggcctactgcc

SEQ ID NO: 178121 - DNA, 25 bp, Saccharomyces pastorianus
gaccagcgaaagatatccccagtga

SEQ ID NO: 178122 - DNA, 25 bp, Saccharomyces pastorianus
ctcccgatcggtacttcagcaaagg

SEQ ID NO: 178123 - DNA, 25 bp, Saccharomyces pastorianus
gtcgctgataaagtccgtgtccatt

SEQ ID NO: 178124 - DNA, 25 bp, Saccharomyces pastorianus
gaccctaatgacgtccacgaagaag

SEQ ID NO: 178125 - DNA, 25 bp, Saccharomyces pastorianus
tattattagatgcactcccgatcgg

SEQ ID NO: 178126 - DNA, 25 bp, Saccharomyces pastorianus
gtacacctcgtgaaaattccgactg

SEQ ID NO: 178127 - DNA, 25 bp, Saccharomyces pastorianus
gtccgtgtccatttgtcttatgtca

SEQ ID NO: 178128 - DNA, 25 bp, Saccharomyces pastorianus
attatttcttcttccgtcttatatt

SEQ ID NO: 178129 - DNA, 25 bp, Saccharomyces pastorianus
ttatttcttcttccgtcttatattt

SEQ ID NO: 178130 - DNA, 25 bp, Saccharomyces pastorianus
tttttattgtcctattacatcatca

SEQ ID NO: 178131 - DNA, 25 bp, Saccharomyces pastorianus
ttcttccgtcttatattttttattg

SEQ ID NO: 178132 - DNA, 25 bp, Saccharomyces pastorianus
tcttcttccgtcttatattttttat

SEQ ID NO: 178133 - DNA, 25 bp, Saccharomyces pastorianus
cgtcttatattttttattgtcctat

SEQ ID NO: 178134 - DNA, 25 bp, Saccharomyces pastorianus
tccgtcttatattttttattgtcct

SEQ ID NO: 178135 - DNA, 25 bp, Saccharomyces pastorianus
ttacgattatttcttcttccgtctt

SEQ ID NO: 178136 - DNA, 25 bp, Saccharomyces pastorianus
acgattatttcttcttccgtcttat

SEQ ID NO: 178137 - DNA, 25 bp, Saccharomyces pastorianus
tacgattatttcttcttccgtctta

SEQ ID NO: 178138 - DNA, 25 bp, Saccharomyces pastorianus
atattttttattgtcctattacatc

SEQ ID NO: 178139 - DNA, 25 bp, Saccharomyces pastorianus
ttgatctcgttctttgtctattggg

SEQ ID NO: 178140 - DNA, 25 bp, Saccharomyces pastorianus
caggcattgcctggcaagtcaataa

SEQ ID NO: 178141 - DNA, 25 bp, Saccharomyces pastorianus
atcgcctgggtttgtggcatgactc

SEQ ID NO: 178142 - DNA, 25 bp, Saccharomyces pastorianus
ggctatgtctagtgttccctatgaa

SEQ ID NO: 178143 - DNA, 25 bp, Saccharomyces pastorianus
gccggtattgtaaacttctactacg

SEQ ID NO: 178144 - DNA, 25 bp, Saccharomyces pastorianus
tccacaacgccggtattgtaaactt

SEQ ID NO: 178145 - DNA, 25 bp, Saccharomyces pastorianus
ttggagagccatcatcgcctgggtt

SEQ ID NO: 178146 - DNA, 25 bp, Saccharomyces pastorianus
gtgttccctatgaaaatcgttgtca

SEQ ID NO: 178147 - DNA, 25 bp, Saccharomyces pastorianus
taactgcatgtctctcctgggcttg

SEQ ID NO: 178148 - DNA, 25 bp, Saccharomyces pastorianus
tccgtcaccaatgcctttattctta

SEQ ID NO: 178149 - DNA, 25 bp, Saccharomyces pastorianus
ctcatttttgatctcgttctttgtc

SEQ ID NO: 178150 - DNA, 25 bp, Saccharomyces pastorianus
agatgaagcagcagaagagccagaa

SEQ ID NO: 178151 - DNA, 25 bp, Saccharomyces pastorianus
aagcagatgaagcagcagatgaagc

SEQ ID NO: 178152 - DNA, 25 bp, Saccharomyces pastorianus
agctgcaccagcgttcttggaggta

SEQ ID NO: 178153 - DNA, 25 bp, Saccharomyces pastorianus
aagctgcagaagaggccttggaaga

SEQ ID NO: 178154 - DNA, 25 bp, Saccharomyces pastorianus
ggagctattagtagatttttctgca

SEQ ID NO: 178155 - DNA, 25 bp, Saccharomyces pastorianus
caccagcgttcttggaggtagcaga

SEQ ID NO: 178156 - DNA, 25 bp, Saccharomyces pastorianus
gaagacttagcagcttcagaagcag

SEQ ID NO: 178157 - DNA, 25 bp, Saccharomyces pastorianus
tttttctgcagaagaggaggccttt

SEQ ID NO: 178158 - DNA, 25 bp, Saccharomyces pastorianus
gcagagccagaagacttggcagagc

SEQ ID NO: 178159 - DNA, 25 bp, Saccharomyces pastorianus
aggcctttgcagaagaggaagctgc

SEQ ID NO: 178160 - DNA, 25 bp, Saccharomyces pastorianus
aagagccagaagacttggcagagct

SEQ ID NO: 178161 - DNA, 25 bp, Saccharomyces pastorianus
tgaagatcctgacttccaagctgcc

SEQ ID NO: 178162 - DNA, 25 bp, Saccharomyces pastorianus
cagtctctgtctcaatttcaagctc

SEQ ID NO: 178163 - DNA, 25 bp, Saccharomyces pastorianus
attttcggtaatccaatctcccaag

SEQ ID NO: 178164 - DNA, 25 bp, Saccharomyces pastorianus
aaaggctacgcgaagagaggtctat

SEQ ID NO: 178165 - DNA, 25 bp, Saccharomyces pastorianus
ccagcgtactacgacattttcggta

SEQ ID NO: 178166 - DNA, 25 bp, Saccharomyces pastorianus
aggccctagaggagagcagaattac

SEQ ID NO: 178167 - DNA, 25 bp, Saccharomyces pastorianus
acagagctgctaggccaaggccaag

SEQ ID NO: 178168 - DNA, 25 bp, Saccharomyces pastorianus
cttccaagctgccttacaactaagt

SEQ ID NO: 178169 - DNA, 25 bp, Saccharomyces pastorianus
aacaaggagcaacccacacgattct

SEQ ID NO: 178170 - DNA, 25 bp, Saccharomyces pastorianus
aacgtagaagagaactggcccagta

SEQ ID NO: 178171 - DNA, 25 bp, Saccharomyces pastorianus
ttctccctcttaccaggacgatttg

SEQ ID NO: 178172 - DNA, 25 bp, Saccharomyces pastorianus
aaacagcatacttccgatactacag

SEQ ID NO: 178173 - DNA, 25 bp, Saccharomyces pastorianus
agtaacatctgatcctgattctgag

SEQ ID NO: 178174 - DNA, 25 bp, Saccharomyces pastorianus
agctctcaaaacacttcattacgat

SEQ ID NO: 178175 - DNA, 25 bp, Saccharomyces pastorianus
ccctctgtcgaggacatttctgaag

SEQ ID NO: 178176 - DNA, 25 bp, Saccharomyces pastorianus
gattacttattagtgtttctgatct

SEQ ID NO: 178177 - DNA, 25 bp, Saccharomyces pastorianus
gtgatcgaaattgaccacatgattg

SEQ ID NO: 178178 - DNA, 25 bp, Saccharomyces pastorianus
aagcaacttgatgacgccaaagcat

SEQ ID NO: 178179 - DNA, 25 bp, Saccharomyces pastorianus
aagtgaaattaattccttacagagc

SEQ ID NO: 178180 - DNA, 25 bp, Saccharomyces pastorianus
ggaccactagtgaagaagacatttt

SEQ ID NO: 178181 - DNA, 25 bp, Saccharomyces pastorianus
gccaaagcatctatttcttcgttaa

SEQ ID NO: 178182 - DNA, 25 bp, Saccharomyces pastorianus
cacatgattgaaacaggcccctctg

SEQ ID NO: 178183 - DNA, 25 bp, Saccharomyces pastorianus
caaagcagtcttcattcgtaccata

SEQ ID NO: 178184 - DNA, 25 bp, Saccharomyces pastorianus
gtcttcattcgtaccatatgttggc

SEQ ID NO: 178185 - DNA, 25 bp, Saccharomyces pastorianus
aaagcagtcttcattcgtaccatat

SEQ ID NO: 178186 - DNA, 25 bp, Saccharomyces pastorianus
aagcagtcttcattcgtaccatatg

SEQ ID NO: 178187 - DNA, 25 bp, Saccharomyces pastorianus
cttcattcgtaccatatgttggcca

SEQ ID NO: 178188 - DNA, 25 bp, Saccharomyces pastorianus
ttcattcgtaccatatgttggccag

SEQ ID NO: 178189 - DNA, 25 bp, Saccharomyces pastorianus
gcagtcttcattcgtaccatatgtt

SEQ ID NO: 178190 - DNA, 25 bp, Saccharomyces pastorianus
agtcttcattcgtaccatatgttgg

SEQ ID NO: 178191 - DNA, 25 bp, Saccharomyces pastorianus
agcagtcttcattcgtaccatatgt

SEQ ID NO: 178192 - DNA, 25 bp, Saccharomyces pastorianus
gcaaagcagtcttcattcgtaccat

SEQ ID NO: 178193 - DNA, 25 bp, Saccharomyces pastorianus
cattcgtaccatatgttggccagac

SEQ ID NO: 178194 - DNA, 25 bp, Saccharomyces pastorianus
tcagaatccgactcgagctcaagct

SEQ ID NO: 178195 - DNA, 25 bp, Saccharomyces pastorianus
tagcgactcttcgtcagattcggat

SEQ ID NO: 178196 - DNA, 25 bp, Saccharomyces pastorianus
agtagttcctccgactcagaatccg

SEQ ID NO: 178197 - DNA, 25 bp, Saccharomyces pastorianus
actccgactccgattctgaaacaaa

SEQ ID NO: 178198 - DNA, 25 bp, Saccharomyces pastorianus
agctcaagctctggctctgggtctg

SEQ ID NO: 178199 - DNA, 25 bp, Saccharomyces pastorianus
ggtctggctctagttctagttctag

SEQ ID NO: 178200 - DNA, 25 bp, Saccharomyces pastorianus
gactgaaccagaatcttcatcctct

SEQ ID NO: 178201 - DNA, 25 bp, Saccharomyces pastorianus
tagctctagcgagtcttcctccgaa

SEQ ID NO: 178202 - DNA, 25 bp, Saccharomyces pastorianus
aagctccagtgagtcctcttcatct

SEQ ID NO: 178203 - DNA, 25 bp, Saccharomyces pastorianus
aatcggactcgagctcaagttctag

SEQ ID NO: 178204 - DNA, 25 bp, Saccharomyces pastorianus
ttcctcgtcagattcaagctccagt

SEQ ID NO: 178205 - DNA, 25 bp, Saccharomyces pastorianus
tctcactttccactccatcacccat

SEQ ID NO: 178206 - DNA, 25 bp, Saccharomyces pastorianus
cactttccactccatcacccatctc

SEQ ID NO: 178207 - DNA, 25 bp, Saccharomyces pastorianus
aatctcactttccactccatcaccc

SEQ ID NO: 178208 - DNA, 25 bp, Saccharomyces pastorianus
actttccactccatcacccatctct

SEQ ID NO: 178209 - DNA, 25 bp, Saccharomyces pastorianus
tcactttccactccatcacccatct

SEQ ID NO: 178210 - DNA, 25 bp, Saccharomyces pastorianus
ctaatctcactttccactccatcac

SEQ ID NO: 178211 - DNA, 25 bp, Saccharomyces pastorianus
taatctcactttccactccatcacc

SEQ ID NO: 178212 - DNA, 25 bp, Saccharomyces pastorianus
atctcactttccactccatcaccca

SEQ ID NO: 178213 - DNA, 25 bp, Saccharomyces pastorianus
ccatcacccatctctcaccatcagt

SEQ ID NO: 178214 - DNA, 25 bp, Saccharomyces pastorianus
cctaatctcactttccactccatca

SEQ ID NO: 178215 - DNA, 25 bp, Saccharomyces pastorianus
tttccactccatcacccatctctca

SEQ ID NO: 178216 - DNA, 25 bp, Saccharomyces pastorianus
tcgttttcttcgtcatcctcctcgt

SEQ ID NO: 178217 - DNA, 25 bp, Saccharomyces pastorianus
ttatcctcgtcctcatcgttttctt

SEQ ID NO: 178218 - DNA, 25 bp, Saccharomyces pastorianus
ttcatgcacattatcctcgtcctca

SEQ ID NO: 178219 - DNA, 25 bp, Saccharomyces pastorianus
agcatcatcatatcgagatcgttct

SEQ ID NO: 178220 - DNA, 25 bp, Saccharomyces pastorianus
tgttctcttgtatgtgttcccgttc

SEQ ID NO: 178221 - DNA, 25 bp, Saccharomyces pastorianus
atgtgttcccgttcatgcacattat

SEQ ID NO: 178222 - DNA, 25 bp, Saccharomyces pastorianus
tctggtcgagtgtttcctctgcggg

SEQ ID NO: 178223 - DNA, 25 bp, Saccharomyces pastorianus
cctctgcaccaaatagcatcatcat

SEQ ID NO: 178224 - DNA, 25 bp, Saccharomyces pastorianus
agatcgttctggtcgagtgtttcct

SEQ ID NO: 178225 - DNA, 25 bp, Saccharomyces pastorianus
gcaccaccttgttctcttgtatgtg

SEQ ID NO: 178226 - DNA, 25 bp, Saccharomyces pastorianus
atcaagttcgcgcaccaccttgttc

SEQ ID NO: 178227 - DNA, 25 bp, Saccharomyces pastorianus
gacgctgccatcaaagccgccggta

SEQ ID NO: 178228 - DNA, 25 bp, Saccharomyces pastorianus
taaggaatacgttgtcgaagacggt

SEQ ID NO: 178229 - DNA, 25 bp, Saccharomyces pastorianus
aaggacgacgctgccatcaaagccg

SEQ ID NO: 178230 - DNA, 25 bp, Saccharomyces pastorianus
ttgaatacaaggacgacgctgccat

SEQ ID NO: 178231 - DNA, 25 bp, Saccharomyces pastorianus
gctgccatcaaagccgccggtaagt

SEQ ID NO: 178232 - DNA, 25 bp, Saccharomyces pastorianus
gatgcaaaagggtaaggaatacgtt

SEQ ID NO: 178233 - DNA, 25 bp, Saccharomyces pastorianus
gaatacaaggacgacgctgccatca

SEQ ID NO: 178234 - DNA, 25 bp, Saccharomyces pastorianus
atacgttgtcgaagacggtgacgtt

SEQ ID NO: 178235 - DNA, 25 bp, Saccharomyces pastorianus
gcccaagttatgaagtgtgaagata

SEQ ID NO: 178236 - DNA, 25 bp, Saccharomyces pastorianus
atacaaggacgacgctgccatcaaa

SEQ ID NO: 178237 - DNA, 25 bp, Saccharomyces pastorianus
agtgtgaagatatccttgaatacaa

SEQ ID NO: 178238 - DNA, 25 bp, Saccharomyces pastorianus
aaaatgagtgcatattcacaaagac

SEQ ID NO: 178239 - DNA, 25 bp, Saccharomyces pastorianus
gtcaagtctgctctatttatacaaa

SEQ ID NO: 178240 - DNA, 25 bp, Saccharomyces pastorianus
gatataagccctactaggaagaaaa

SEQ ID NO: 178241 - DNA, 25 bp, Saccharomyces pastorianus
ctgatataagccctactaggaagaa

SEQ ID NO: 178242 - DNA, 25 bp, Saccharomyces pastorianus
aatgagtgcatattcacaaagacag

SEQ ID NO: 178243 - DNA, 25 bp, Saccharomyces pastorianus
gtctgctctatttatacaaattcct

SEQ ID NO: 178244 - DNA, 25 bp, Saccharomyces pastorianus
tcaagtctgctctatttatacaaat

SEQ ID NO: 178245 - DNA, 25 bp, Saccharomyces pastorianus
agtctgctctatttatacaaattcc

SEQ ID NO: 178246 - DNA, 25 bp, Saccharomyces pastorianus
gggtcaagtctgctctatttataca

SEQ ID NO: 178247 - DNA, 25 bp, Saccharomyces pastorianus
ggtcaagtctgctctatttatacaa

SEQ ID NO: 178248 - DNA, 25 bp, Saccharomyces pastorianus
caagtctgctctatttatacaaatt

SEQ ID NO: 178249 - DNA, 25 bp, Saccharomyces pastorianus
gtgaatctacacattcagcccaaga

SEQ ID NO: 178250 - DNA, 25 bp, Saccharomyces pastorianus
atagcgcgagtgaatctacacattc

SEQ ID NO: 178251 - DNA, 25 bp, Saccharomyces pastorianus
cagcatttgcagcatcaagagatgt

SEQ ID NO: 178252 - DNA, 25 bp, Saccharomyces pastorianus
aagagatgtcaatgggcagcccgaa

SEQ ID NO: 178253 - DNA, 25 bp, Saccharomyces pastorianus
gatgcaagacaacagacacctacag

SEQ ID NO: 178254 - DNA, 25 bp, Saccharomyces pastorianus
aaaggccaaactaaaccatatgact

SEQ ID NO: 178255 - DNA, 25 bp, Saccharomyces pastorianus
gatgaaaatccaattgagccagagg

SEQ ID NO: 178256 - DNA, 25 bp, Saccharomyces pastorianus
gcagcccgaagctttgctaggtgat

SEQ ID NO: 178257 - DNA, 25 bp, Saccharomyces pastorianus
agctttgctaggtgatgaaaatcca

SEQ ID NO: 178258 - DNA, 25 bp, Saccharomyces pastorianus
gacacctacagcatttgcagcatca

SEQ ID NO: 178259 - DNA, 25 bp, Saccharomyces pastorianus
ggttgatttatataatagcgcgagt

SEQ ID NO: 178260 - DNA, 25 bp, Saccharomyces pastorianus
gacaaaatcaccaacgaactcactg

SEQ ID NO: 178261 - DNA, 25 bp, Saccharomyces pastorianus
attttcttcgtaggccaggccactg

SEQ ID NO: 178262 - DNA, 25 bp, Saccharomyces pastorianus
aaaatcaccaacgaactcactgtat

SEQ ID NO: 178263 - DNA, 25 bp, Saccharomyces pastorianus
acaaaatcaccaacgaactcactgt

SEQ ID NO: 178264 - DNA, 25 bp, Saccharomyces pastorianus
taggccaggccactggcctgaatat

SEQ ID NO: 178265 - DNA, 25 bp, Saccharomyces pastorianus
gtaggccaggccactggcctgaata

SEQ ID NO: 178266 - DNA, 25 bp, Saccharomyces pastorianus
gaattttcttcgtaggccaggccac

SEQ ID NO: 178267 - DNA, 25 bp, Saccharomyces pastorianus
aatcaccaacgaactcactgtattc

SEQ ID NO: 178268 - DNA, 25 bp, Saccharomyces pastorianus
aaatcaccaacgaactcactgtatt

SEQ ID NO: 178269 - DNA, 25 bp, Saccharomyces pastorianus
caaaatcaccaacgaactcactgta

SEQ ID NO: 178270 - DNA, 25 bp, Saccharomyces pastorianus
aattttcttcgtaggccaggccact

SEQ ID NO: 178271 - DNA, 25 bp, Saccharomyces pastorianus
accaaatgcattcgcatcattatgc

SEQ ID NO: 178272 - DNA, 25 bp, Saccharomyces pastorianus
taccaaatgcattcgcatcattatg

SEQ ID NO: 178273 - DNA, 25 bp, Saccharomyces pastorianus
actctcacattccactccatgaccc

SEQ ID NO: 178274 - DNA, 25 bp, Saccharomyces pastorianus
tccatgacccatctctcaccatcag

SEQ ID NO: 178275 - DNA, 25 bp, Saccharomyces pastorianus
ctactctcacattccactccatgac

SEQ ID NO: 178276 - DNA, 25 bp, Saccharomyces pastorianus
cagtaccaaatgcattcgcatcatt

SEQ ID NO: 178277 - DNA, 25 bp, Saccharomyces pastorianus
tactctcacattccactccatgacc

SEQ ID NO: 178278 - DNA, 25 bp, Saccharomyces pastorianus
tcagtaccaaatgcattcgcatcat

SEQ ID NO: 178279 - DNA, 25 bp, Saccharomyces pastorianus
catgacccatctctcaccatcagta

SEQ ID NO: 178280 - DNA, 25 bp, Saccharomyces pastorianus
ccatgacccatctctcaccatcagt

SEQ ID NO: 178281 - DNA, 25 bp, Saccharomyces pastorianus
cctactctcacattccactccatga

SEQ ID NO: 178282 - DNA, 25 bp, Saccharomyces pastorianus
gtgtattcagtagcgacgccgctaa

SEQ ID NO: 178283 - DNA, 25 bp, Saccharomyces pastorianus
agtgtattcagtagcgacgccgcta

SEQ ID NO: 178284 - DNA, 25 bp, Saccharomyces pastorianus
tagtgtattcagtagcgacgccgct

SEQ ID NO: 178285 - DNA, 25 bp, Saccharomyces pastorianus
gacgccgctaacagtggtcgtagca

SEQ ID NO: 178286 - DNA, 25 bp, Saccharomyces pastorianus
gtattcagtagcgacgccgctaaca

SEQ ID NO: 178287 - DNA, 25 bp, Saccharomyces pastorianus
attcagtagcgacgccgctaacagt

SEQ ID NO: 178288 - DNA, 25 bp, Saccharomyces pastorianus
acgccgctaacagtggtcgtagcag

SEQ ID NO: 178289 - DNA, 25 bp, Saccharomyces pastorianus
cgtagcagtagaaacgatggcagga

SEQ ID NO: 178290 - DNA, 25 bp, Saccharomyces pastorianus
ggtcgtagcagtagaaacgatggca

SEQ ID NO: 178291 - DNA, 25 bp, Saccharomyces pastorianus
tgtagtgtattcagtagcgacgccg

SEQ ID NO: 178292 - DNA, 25 bp, Saccharomyces pastorianus
agcgacgccgctaacagtggtcgta

SEQ ID NO: 178293 - DNA, 25 bp, Saccharomyces pastorianus
gtatctttccatttggctccatcgc

SEQ ID NO: 178294 - DNA, 25 bp, Saccharomyces pastorianus
tccatcgccgttgagttgtatttca

SEQ ID NO: 178295 - DNA, 25 bp, Saccharomyces pastorianus
tttctctttcctcctattaactttg

SEQ ID NO: 178296 - DNA, 25 bp, Saccharomyces pastorianus
acttatcattccttatgcctggaga

SEQ ID NO: 178297 - DNA, 25 bp, Saccharomyces pastorianus
attgtcttatacgtgggatactcct

SEQ ID NO: 178298 - DNA, 25 bp, Saccharomyces pastorianus
gggtggattcacgactattgtctta

SEQ ID NO: 178299 - DNA, 25 bp, Saccharomyces pastorianus
tcatttcattactctgctgtttggt

SEQ ID NO: 178300 - DNA, 25 bp, Saccharomyces pastorianus
gctactttgattgctggtatctttc

SEQ ID NO: 178301 - DNA, 25 bp, Saccharomyces pastorianus
agttcactcgtcactattttgatca

SEQ ID NO: 178302 - DNA, 25 bp, Saccharomyces pastorianus
tacatgtttggtttcctctttttct

SEQ ID NO: 178303 - DNA, 25 bp, Saccharomyces pastorianus
ggatactcctcagtcatttcattac

SEQ ID NO: 178304 - DNA, 25 bp, Saccharomyces pastorianus
aagtttctgaccttcgttgaagacg

SEQ ID NO: 178305 - DNA, 25 bp, Saccharomyces pastorianus
agtttctgaccttcgttgaagacga

SEQ ID NO: 178306 - DNA, 25 bp, Saccharomyces pastorianus
tcattcccgtcgtggtcaagaaaaa

SEQ ID NO: 178307 - DNA, 25 bp, Saccharomyces pastorianus
gtttctgaccttcgttgaagacgaa

SEQ ID NO: 178308 - DNA, 25 bp, Saccharomyces pastorianus
attcccgtcgtggtcaagaaaaatg

SEQ ID NO: 178309 - DNA, 25 bp, Saccharomyces pastorianus
cgtcgtggtcaagaaaaatgcacaa

SEQ ID NO: 178310 - DNA, 25 bp, Saccharomyces pastorianus
tggtcaagaaaaatgcacaaaagtt

SEQ ID NO: 178311 - DNA, 25 bp, Saccharomyces pastorianus
tcccgtcgtggtcaagaaaaatgca

SEQ ID NO: 178312 - DNA, 25 bp, Saccharomyces pastorianus
tctgaccttcgttgaagacgaacca

SEQ ID NO: 178313 - DNA, 25 bp, Saccharomyces pastorianus
cattcccgtcgtggtcaagaaaaat

SEQ ID NO: 178314 - DNA, 25 bp, Saccharomyces pastorianus
gtcattcccgtcgtggtcaagaaaa

SEQ ID NO: 178315 - DNA, 25 bp, Saccharomyces pastorianus
agaaagtacattccctataatattt

SEQ ID NO: 178316 - DNA, 25 bp, Saccharomyces pastorianus
gggccctacagaaagtacattccct

SEQ ID NO: 178317 - DNA, 25 bp, Saccharomyces pastorianus
gtcacttaaatacgcttgattatat

SEQ ID NO: 178318 - DNA, 25 bp, Saccharomyces pastorianus
tccaacaatgtggaattggtcactt

SEQ ID NO: 178319 - DNA, 25 bp, Saccharomyces pastorianus
gtacattccctataatattttccaa

SEQ ID NO: 178320 - DNA, 25 bp, Saccharomyces pastorianus
ttccctataatattttccaacaatg

SEQ ID NO: 178321 - DNA, 25 bp, Saccharomyces pastorianus
gccctacagaaagtacattccctat

SEQ ID NO: 178322 - DNA, 25 bp, Saccharomyces pastorianus
tggtcacttaaatacgcttgattat

SEQ ID NO: 178323 - DNA, 25 bp, Saccharomyces pastorianus
gtggaattggtcacttaaatacgct

SEQ ID NO: 178324 - DNA, 25 bp, Saccharomyces pastorianus
ggaattggtcacttaaatacgcttg

SEQ ID NO: 178325 - DNA, 25 bp, Saccharomyces pastorianus
aattggtcacttaaatacgcttgat

SEQ ID NO: 178326 - DNA, 25 bp, Saccharomyces pastorianus
gaaagttctttacagatgatgcaaa

SEQ ID NO: 178327 - DNA, 25 bp, Saccharomyces pastorianus
gaaattgctcctgagtatttaacaa

SEQ ID NO: 178328 - DNA, 25 bp, Saccharomyces pastorianus
gtcctcgggagcagatgctgtcaaa

SEQ ID NO: 178329 - DNA, 25 bp, Saccharomyces pastorianus
agaaacaacttcaatcagggagctg

SEQ ID NO: 178330 - DNA, 25 bp, Saccharomyces pastorianus
attatctgccacgaaagggttcaag

SEQ ID NO: 178331 - DNA, 25 bp, Saccharomyces pastorianus
gaggaagaccctctaaacgacccat

SEQ ID NO: 178332 - DNA, 25 bp, Saccharomyces pastorianus
gacagcagtgacaatgacgctcaga

SEQ ID NO: 178333 - DNA, 25 bp, Saccharomyces pastorianus
tgacgctcagaataagaatgctagt

SEQ ID NO: 178334 - DNA, 25 bp, Saccharomyces pastorianus
agatctttatcattgccgtcctcgg

SEQ ID NO: 178335 - DNA, 25 bp, Saccharomyces pastorianus
gaattcttccaatgcttcagagtat

SEQ ID NO: 178336 - DNA, 25 bp, Saccharomyces pastorianus
aaacgacccattcgcttcaagtaga

SEQ ID NO: 178337 - DNA, 25 bp, Saccharomyces pastorianus
gtgtcgtcgccatcgcttccggtgc

SEQ ID NO: 178338 - DNA, 25 bp, Saccharomyces pastorianus
ggtgtcgtcgccatcgcttccggtg

SEQ ID NO: 178339 - DNA, 25 bp, Saccharomyces pastorianus
atggtcaaattagcttctatcgccg

SEQ ID NO: 178340 - DNA, 25 bp, Saccharomyces pastorianus
ggtcaaattagcttctatcgccgct

SEQ ID NO: 178341 - DNA, 25 bp, Saccharomyces pastorianus
ccaccaccaccctagctcaatccga

SEQ ID NO: 178342 - DNA, 25 bp, Saccharomyces pastorianus
tgtcgtcgccatcgcttccggtgcc

SEQ ID NO: 178343 - DNA, 25 bp, Saccharomyces pastorianus
tggtgtcgtcgccatcgcttccggt

SEQ ID NO: 178344 - DNA, 25 bp, Saccharomyces pastorianus
tcgtcgccatcgcttccggtgccgc

SEQ ID NO: 178345 - DNA, 25 bp, Saccharomyces pastorianus
gtcgccatcgcttccggtgccgccg

SEQ ID NO: 178346 - DNA, 25 bp, Saccharomyces pastorianus
tcgccatcgcttccggtgccgccgc

SEQ ID NO: 178347 - DNA, 25 bp, Saccharomyces pastorianus
atcgcttccggtgccgccgccgcca

SEQ ID NO: 178348 - DNA, 25 bp, Saccharomyces pastorianus
taagaaatgattctcatcactccat

SEQ ID NO: 178349 - DNA, 25 bp, Saccharomyces pastorianus
cactccatctcatcctatatattta

SEQ ID NO: 178350 - DNA, 25 bp, Saccharomyces pastorianus
atgattctcatcactccatctcatc

SEQ ID NO: 178351 - DNA, 25 bp, Saccharomyces pastorianus
tcactccatctcatcctatatattt

SEQ ID NO: 178352 - DNA, 25 bp, Saccharomyces pastorianus
aatgattctcatcactccatctcat

SEQ ID NO: 178353 - DNA, 25 bp, Saccharomyces pastorianus
ctcatcctatatatttaacagcttt

SEQ ID NO: 178354 - DNA, 25 bp, Saccharomyces pastorianus
actccatctcatcctatatatttaa

SEQ ID NO: 178355 - DNA, 25 bp, Saccharomyces pastorianus
atcactccatctcatcctatatatt

SEQ ID NO: 178356 - DNA, 25 bp, Saccharomyces pastorianus
aaatgattctcatcactccatctca

SEQ ID NO: 178357 - DNA, 25 bp, Saccharomyces pastorianus
gaaatgattctcatcactccatctc

SEQ ID NO: 178358 - DNA, 25 bp, Saccharomyces pastorianus
ccatctcatcctatatatttaacag

SEQ ID NO: 178359 - DNA, 25 bp, Saccharomyces pastorianus
tagtattatgtatacagcatatact

SEQ ID NO: 178360 - DNA, 25 bp, Saccharomyces pastorianus
agtattatgtatacagcatatacta

SEQ ID NO: 178361 - DNA, 25 bp, Saccharomyces pastorianus
ctatagtattatgtatacagcatat

SEQ ID NO: 178362 - DNA, 25 bp, Saccharomyces pastorianus
atgatcaaggctatagtattatgta

SEQ ID NO: 178363 - DNA, 25 bp, Saccharomyces pastorianus
atagtattatgtatacagcatatac

SEQ ID NO: 178364 - DNA, 25 bp, Saccharomyces pastorianus
atcaaggctatagtattatgtatac

SEQ ID NO: 178365 - DNA, 25 bp, Saccharomyces pastorianus
gctatagtattatgtatacagcata

SEQ ID NO: 178366 - DNA, 25 bp, Saccharomyces pastorianus
tgatcaaggctatagtattatgtat

SEQ ID NO: 178367 - DNA, 25 bp, Saccharomyces pastorianus
gatcaaggctatagtattatgtata

SEQ ID NO: 178368 - DNA, 25 bp, Saccharomyces pastorianus
tatagtattatgtatacagcatata

SEQ ID NO: 178369 - DNA, 25 bp, Saccharomyces pastorianus
ggctatagtattatgtatacagcat

SEQ ID NO: 178370 - DNA, 25 bp, Saccharomyces pastorianus
gcagccaatctgtctccaaggagga

SEQ ID NO: 178371 - DNA, 25 bp, Saccharomyces pastorianus
aaatacttggaaggctctgtcacag

SEQ ID NO: 178372 - DNA, 25 bp, Saccharomyces pastorianus
gttagaattatctttcgaccgacag

SEQ ID NO: 178373 - DNA, 25 bp, Saccharomyces pastorianus
acagttggacagtattgcacagtta

SEQ ID NO: 178374 - DNA, 25 bp, Saccharomyces pastorianus
ggccgaaattgacaccttgaaaggt

SEQ ID NO: 178375 - DNA, 25 bp, Saccharomyces pastorianus
ttaataaatcagcaaccccatcgcc

SEQ ID NO: 178376 - DNA, 25 bp, Saccharomyces pastorianus
cttgaaaggtcacagcagccaatct

SEQ ID NO: 178377 - DNA, 25 bp, Saccharomyces pastorianus
gaactgctaaccactaatgctatct

SEQ ID NO: 178378 - DNA, 25 bp, Saccharomyces pastorianus
atcatcgggaaataccatgtcgcat

SEQ ID NO: 178379 - DNA, 25 bp, Saccharomyces pastorianus
aaaaggatccgtaagctcatcatcg

SEQ ID NO: 178380 - DNA, 25 bp, Saccharomyces pastorianus
tctgtcacagagctcggaattaata

SEQ ID NO: 178381 - DNA, 25 bp, Saccharomyces pastorianus
gacattaaacgggttcgcttctaca

SEQ ID NO: 178382 - DNA, 25 bp, Saccharomyces pastorianus
tagcgatgtgctcaggtcgatttct

SEQ ID NO: 178383 - DNA, 25 bp, Saccharomyces pastorianus
cgggttcgcttctacattgtctagc

SEQ ID NO: 178384 - DNA, 25 bp, Saccharomyces pastorianus
ctacattgtctagcgatgtgctcag

SEQ ID NO: 178385 - DNA, 25 bp, Saccharomyces pastorianus
gtctagcgatgtgctcaggtcgatt

SEQ ID NO: 178386 - DNA, 25 bp, Saccharomyces pastorianus
cattaaacgggttcgcttctacatt

SEQ ID NO: 178387 - DNA, 25 bp, Saccharomyces pastorianus
taaacgggttcgcttctacattgtc

SEQ ID NO: 178388 - DNA, 25 bp, Saccharomyces pastorianus
gcttctacattgtctagcgatgtgc

SEQ ID NO: 178389 - DNA, 25 bp, Saccharomyces pastorianus
cattgtctagcgatgtgctcaggtc

SEQ ID NO: 178390 - DNA, 25 bp, Saccharomyces pastorianus
aacgggttcgcttctacattgtcta

SEQ ID NO: 178391 - DNA, 25 bp, Saccharomyces pastorianus
ggttcgcttctacattgtctagcga

SEQ ID NO: 178392 - DNA, 25 bp, Saccharomyces pastorianus
gtcggtccgaagacgtactagaaga

SEQ ID NO: 178393 - DNA, 25 bp, Saccharomyces pastorianus
agacgtactagaagatgggcaaatt

SEQ ID NO: 178394 - DNA, 25 bp, Saccharomyces pastorianus
atgggcaaattggagaacctggaca

SEQ ID NO: 178395 - DNA, 25 bp, Saccharomyces pastorianus
gcaaattggagaacctggacaagaa

SEQ ID NO: 178396 - DNA, 25 bp, Saccharomyces pastorianus
gcagtcggtccgaagacgtactaga

SEQ ID NO: 178397 - DNA, 25 bp, Saccharomyces pastorianus
ctgtcgaaggacatgaacaagtcgg

SEQ ID NO: 178398 - DNA, 25 bp, Saccharomyces pastorianus
aagaggtaaccggtcaaggcagtcg

SEQ ID NO: 178399 - DNA, 25 bp, Saccharomyces pastorianus
aaggcagtcggtccgaagacgtact

SEQ ID NO: 178400 - DNA, 25 bp, Saccharomyces pastorianus
cgaaggacatgaacaagtcggacac

SEQ ID NO: 178401 - DNA, 25 bp, Saccharomyces pastorianus
gtaaccggtcaaggcagtcggtccg

SEQ ID NO: 178402 - DNA, 25 bp, Saccharomyces pastorianus
cgaagacgtactagaagatgggcaa

SEQ ID NO: 178403 - DNA, 25 bp, Saccharomyces pastorianus
catttacccataaagtccatcatta

SEQ ID NO: 178404 - DNA, 25 bp, Saccharomyces pastorianus
ttacccataaagtccatcattatcc

SEQ ID NO: 178405 - DNA, 25 bp, Saccharomyces pastorianus
taccacttttacgccatatactaac

SEQ ID NO: 178406 - DNA, 25 bp, Saccharomyces pastorianus
ataccacttttacgccatatactaa

SEQ ID NO: 178407 - DNA, 25 bp, Saccharomyces pastorianus
tataccacttttacgccatatacta

SEQ ID NO: 178408 - DNA, 25 bp, Saccharomyces pastorianus
ttataccacttttacgccatatact

SEQ ID NO: 178409 - DNA, 25 bp, Saccharomyces pastorianus
tacccataaagtccatcattatcca

SEQ ID NO: 178410 - DNA, 25 bp, Saccharomyces pastorianus
cgttataccacttttacgccatata

SEQ ID NO: 178411 - DNA, 25 bp, Saccharomyces pastorianus
atttacccataaagtccatcattat

SEQ ID NO: 178412 - DNA, 25 bp, Saccharomyces pastorianus
cccataaagtccatcattatccaca

SEQ ID NO: 178413 - DNA, 25 bp, Saccharomyces pastorianus
gttataccacttttacgccatatac

SEQ ID NO: 178414 - DNA, 25 bp, Saccharomyces pastorianus
cacaccctctgtggcagtacaggcc

SEQ ID NO: 178415 - DNA, 25 bp, Saccharomyces pastorianus
accctctgtggcagtacaggcccca

SEQ ID NO: 178416 - DNA, 25 bp, Saccharomyces pastorianus
gcagacacaccctctgtggcagtac

SEQ ID NO: 178417 - DNA, 25 bp, Saccharomyces pastorianus
acacaccctctgtggcagtacaggc

SEQ ID NO: 178418 - DNA, 25 bp, Saccharomyces pastorianus
atggcagacacaccctctgtggcag

SEQ ID NO: 178419 - DNA, 25 bp, Saccharomyces pastorianus
ctgtggcagtacaggccccaccggg

SEQ ID NO: 178420 - DNA, 25 bp, Saccharomyces pastorianus
cagacacaccctctgtggcagtaca

SEQ ID NO: 178421 - DNA, 25 bp, Saccharomyces pastorianus
ggcagacacaccctctgtggcagta

SEQ ID NO: 178422 - DNA, 25 bp, Saccharomyces pastorianus
tggcagacacaccctctgtggcagt

SEQ ID NO: 178423 - DNA, 25 bp, Saccharomyces pastorianus
gacacaccctctgtggcagtacagg

SEQ ID NO: 178424 - DNA, 25 bp, Saccharomyces pastorianus
agacacaccctctgtggcagtacag

SEQ ID NO: 178425 - DNA, 25 bp, Saccharomyces pastorianus
gaagcaaccagttcaactgctccaa

SEQ ID NO: 178426 - DNA, 25 bp, Saccharomyces pastorianus
gcaaccagctcaaccagctcaacta

SEQ ID NO: 178427 - DNA, 25 bp, Saccharomyces pastorianus
actgctccaaccagttcaactgacg

SEQ ID NO: 178428 - DNA, 25 bp, Saccharomyces pastorianus
gctccaaccagttcaactgacgcaa

SEQ ID NO: 178429 - DNA, 25 bp, Saccharomyces pastorianus
agttcaactgctccaaccagttcaa

SEQ ID NO: 178430 - DNA, 25 bp, Saccharomyces pastorianus
caactgctccaaccagttcaactga

SEQ ID NO: 178431 - DNA, 25 bp, Saccharomyces pastorianus
acgcaaccagctcaaccagctcaac

SEQ ID NO: 178432 - DNA, 25 bp, Saccharomyces pastorianus
gacgcaaccagctcaaccagctcaa

SEQ ID NO: 178433 - DNA, 25 bp, Saccharomyces pastorianus
ttcaactgctccaaccagttcaact

SEQ ID NO: 178434 - DNA, 25 bp, Saccharomyces pastorianus
aaccagttcaactgaagcaaccagt

SEQ ID NO: 178435 - DNA, 25 bp, Saccharomyces pastorianus
tcaaccagctcaactacttcaactg

SEQ ID NO: 178436 - DNA, 25 bp, Saccharomyces pastorianus
ttccagtgaggatgctgctgtttca

SEQ ID NO: 178437 - DNA, 25 bp, Saccharomyces pastorianus
attactgctctacaattctcacatc

SEQ ID NO: 178438 - DNA, 25 bp, Saccharomyces pastorianus
gggacacacggcaagggttaatgat

SEQ ID NO: 178439 - DNA, 25 bp, Saccharomyces pastorianus
ggctcatacgagcacaacattttgt

SEQ ID NO: 178440 - DNA, 25 bp, Saccharomyces pastorianus
gatgtggatattcaccccaccaata

SEQ ID NO: 178441 - DNA, 25 bp, Saccharomyces pastorianus
gatgcagcaaagacaccacatttta

SEQ ID NO: 178442 - DNA, 25 bp, Saccharomyces pastorianus
gatgactctaagaaatgctgctgta

SEQ ID NO: 178443 - DNA, 25 bp, Saccharomyces pastorianus
tatttcattttcaagcccattcgtt

SEQ ID NO: 178444 - DNA, 25 bp, Saccharomyces pastorianus
agtcatcagggctctattactgctc

SEQ ID NO: 178445 - DNA, 25 bp, Saccharomyces pastorianus
ggatccaatgacgagcacatcagaa

SEQ ID NO: 178446 - DNA, 25 bp, Saccharomyces pastorianus
gaagatacctagtttctggatccaa

SEQ ID NO: 178447 - DNA, 25 bp, Saccharomyces pastorianus
ttgaagattcgtttttgtggattcc

SEQ ID NO: 178448 - DNA, 25 bp, Saccharomyces pastorianus
aattatcgtctgatttttacagggt

SEQ ID NO: 178449 - DNA, 25 bp, Saccharomyces pastorianus
aaatccacgaggaaaatctctagta

SEQ ID NO: 178450 - DNA, 25 bp, Saccharomyces pastorianus
atcccaaaaattatcgtctgatttt

SEQ ID NO: 178451 - DNA, 25 bp, Saccharomyces pastorianus
tcgtctgatttttacagggtaatac

SEQ ID NO: 178452 - DNA, 25 bp, Saccharomyces pastorianus
aaattatcgtctgatttttacaggg

SEQ ID NO: 178453 - DNA, 25 bp, Saccharomyces pastorianus
tggaatcccaaaaattatcgtctga

SEQ ID NO: 178454 - DNA, 25 bp, Saccharomyces pastorianus
tatcgtctgatttttacagggtaat

SEQ ID NO: 178455 - DNA, 25 bp, Saccharomyces pastorianus
attatcgtctgatttttacagggta

SEQ ID NO: 178456 - DNA, 25 bp, Saccharomyces pastorianus
gtctgatttttacagggtaatacta

SEQ ID NO: 178457 - DNA, 25 bp, Saccharomyces pastorianus
catcatgcaaaattgaagattcgtt

SEQ ID NO: 178458 - DNA, 25 bp, Saccharomyces pastorianus
tcacttggcccaatactacatgttc

SEQ ID NO: 178459 - DNA, 25 bp, Saccharomyces pastorianus
cagattaaagccagccatctccagt

SEQ ID NO: 178460 - DNA, 25 bp, Saccharomyces pastorianus
tgaaacctacccagtcgaagttgct

SEQ ID NO: 178461 - DNA, 25 bp, Saccharomyces pastorianus
aaagccagccatctccagtgctcta

SEQ ID NO: 178462 - DNA, 25 bp, Saccharomyces pastorianus
agattaaagccagccatctccagtg

SEQ ID NO: 178463 - DNA, 25 bp, Saccharomyces pastorianus
attaaagccagccatctccagtgct

SEQ ID NO: 178464 - DNA, 25 bp, Saccharomyces pastorianus
gattaaagccagccatctccagtgc

SEQ ID NO: 178465 - DNA, 25 bp, Saccharomyces pastorianus
tgaccagaatgatcaccggtgttcc

SEQ ID NO: 178466 - DNA, 25 bp, Saccharomyces pastorianus
taaagccagccatctccagtgctct

SEQ ID NO: 178467 - DNA, 25 bp, Saccharomyces pastorianus
ttaaagccagccatctccagtgctc

SEQ ID NO: 178468 - DNA, 25 bp, Saccharomyces pastorianus
agtgaccagaatgatcaccggtgtt

SEQ ID NO: 178469 - DNA, 25 bp, Saccharomyces pastorianus
taagagatataagaacctaaacggt

SEQ ID NO: 178470 - DNA, 25 bp, Saccharomyces pastorianus
tgggatctgctaaggataaccttac

SEQ ID NO: 178471 - DNA, 25 bp, Saccharomyces pastorianus
ttgtaagtttggtggtaagagatat

SEQ ID NO: 178472 - DNA, 25 bp, Saccharomyces pastorianus
atctgctaaggataaccttaccttt

SEQ ID NO: 178473 - DNA, 25 bp, Saccharomyces pastorianus
tgctaaggataaccttaccttttgt

SEQ ID NO: 178474 - DNA, 25 bp, Saccharomyces pastorianus
gggatctgctaaggataaccttacc

SEQ ID NO: 178475 - DNA, 25 bp, Saccharomyces pastorianus
atgggatctgctaaggataacctta

SEQ ID NO: 178476 - DNA, 25 bp, Saccharomyces pastorianus
gatctgctaaggataaccttacctt

SEQ ID NO: 178477 - DNA, 25 bp, Saccharomyces pastorianus
ctgctaaggataaccttaccttttg

SEQ ID NO: 178478 - DNA, 25 bp, Saccharomyces pastorianus
tctgctaaggataaccttacctttt

SEQ ID NO: 178479 - DNA, 25 bp, Saccharomyces pastorianus
ggatctgctaaggataaccttacct

SEQ ID NO: 178480 - DNA, 25 bp, Saccharomyces pastorianus
attgacatggaggtctacggacggt

SEQ ID NO: 178481 - DNA, 25 bp, Saccharomyces pastorianus
gttcacacagttgtcttatccacta

SEQ ID NO: 178482 - DNA, 25 bp, Saccharomyces pastorianus
cattccggagctgccatttttgaga

SEQ ID NO: 178483 - DNA, 25 bp, Saccharomyces pastorianus
tacggacggtgacaaggttcacaca

SEQ ID NO: 178484 - DNA, 25 bp, Saccharomyces pastorianus
ttgacaagttacaagctacccctgc

SEQ ID NO: 178485 - DNA, 25 bp, Saccharomyces pastorianus
tgacccttcaacaaatcatctcacg

SEQ ID NO: 178486 - DNA, 25 bp, Saccharomyces pastorianus
gtttcacccgcagaattgacatgga

SEQ ID NO: 178487 - DNA, 25 bp, Saccharomyces pastorianus
aaatgaggatgtttcacccgcagaa

SEQ ID NO: 178488 - DNA, 25 bp, Saccharomyces pastorianus
gcccaaaccgcaacgtcatatgtta

SEQ ID NO: 178489 - DNA, 25 bp, Saccharomyces pastorianus
ctacccctgcttccagtgaaaaaat

SEQ ID NO: 178490 - DNA, 25 bp, Saccharomyces pastorianus
aaatgaggttgtgcccaaaccgcaa

SEQ ID NO: 178491 - DNA, 25 bp, Saccharomyces pastorianus
gaatatcgacaactccattactaat

SEQ ID NO: 178492 - DNA, 25 bp, Saccharomyces pastorianus
tttttgatgcaaaggcgtccaattc

SEQ ID NO: 178493 - DNA, 25 bp, Saccharomyces pastorianus
aaggcgtccaattcggtaatcaaga

SEQ ID NO: 178494 - DNA, 25 bp, Saccharomyces pastorianus
ttttgaggaaatacacgccaccatt

SEQ ID NO: 178495 - DNA, 25 bp, Saccharomyces pastorianus
cgacatgctccgtttttgcaaacat

SEQ ID NO: 178496 - DNA, 25 bp, Saccharomyces pastorianus
aaattatgcgatgcgacatgctccg

SEQ ID NO: 178497 - DNA, 25 bp, Saccharomyces pastorianus
tacacgccaccattaggtaaattgg

SEQ ID NO: 178498 - DNA, 25 bp, Saccharomyces pastorianus
tgcaaacattgcaaagccagttatt

SEQ ID NO: 178499 - DNA, 25 bp, Saccharomyces pastorianus
gacggcgattactacaattatcatc

SEQ ID NO: 178500 - DNA, 25 bp, Saccharomyces pastorianus
aattggcaggcgagagatctgcttc

SEQ ID NO: 178501 - DNA, 25 bp, Saccharomyces pastorianus
gatctgcttcagacggcgattacta

SEQ ID NO: 178502 - DNA, 25 bp, Saccharomyces pastorianus
tcctgttttccattaaaatctcaag

SEQ ID NO: 178503 - DNA, 25 bp, Saccharomyces pastorianus
tctcaagaaccgaccccttgactgt

SEQ ID NO: 178504 - DNA, 25 bp, Saccharomyces pastorianus
gtgctcatatatcaagtatcggttt

SEQ ID NO: 178505 - DNA, 25 bp, Saccharomyces pastorianus
accccttgactgtgctcatatatca

SEQ ID NO: 178506 - DNA, 25 bp, Saccharomyces pastorianus
agacctgtatgtgcaactttcctgt

SEQ ID NO: 178507 - DNA, 25 bp, Saccharomyces pastorianus
gcaagcaaagaaaagcagacctgta

SEQ ID NO: 178508 - DNA, 25 bp, Saccharomyces pastorianus
aagtcccctaattgtgataattgca

SEQ ID NO: 178509 - DNA, 25 bp, Saccharomyces pastorianus
gataattgcaagaacgacagtcaga

SEQ ID NO: 178510 - DNA, 25 bp, Saccharomyces pastorianus
agtatcgttgtctggagcaagcaaa

SEQ ID NO: 178511 - DNA, 25 bp, Saccharomyces pastorianus
gttttagttctaagtatcgttgtct

SEQ ID NO: 178512 - DNA, 25 bp, Saccharomyces pastorianus
atgtgcaactttcctgttttccatt

SEQ ID NO: 178513 - DNA, 25 bp, Saccharomyces pastorianus
gaagggctatgtctctaaggaaact

SEQ ID NO: 178514 - DNA, 25 bp, Saccharomyces pastorianus
gtgagattgagtatgtcccctttga

SEQ ID NO: 178515 - DNA, 25 bp, Saccharomyces pastorianus
ccaagaaggattatgtcgccggaat

SEQ ID NO: 178516 - DNA, 25 bp, Saccharomyces pastorianus
gcaaccgcaggagtttacgtgacat

SEQ ID NO: 178517 - DNA, 25 bp, Saccharomyces pastorianus
ggatatcacctaacaagacagatgg

SEQ ID NO: 178518 - DNA, 25 bp, Saccharomyces pastorianus
aaaagcaaccgcaggagtttacgtg

SEQ ID NO: 178519 - DNA, 25 bp, Saccharomyces pastorianus
agtttttgaaaccacctatgaggat

SEQ ID NO: 178520 - DNA, 25 bp, Saccharomyces pastorianus
gtatacaagtaacaccaagaaggat

SEQ ID NO: 178521 - DNA, 25 bp, Saccharomyces pastorianus
tgaggacgacaagccaaaaagagtt

SEQ ID NO: 178522 - DNA, 25 bp, Saccharomyces pastorianus
gaaaccacctatgaggatatcacct

SEQ ID NO: 178523 - DNA, 25 bp, Saccharomyces pastorianus
gagtatgtcccctttgaggacgaca

SEQ ID NO: 178524 - DNA, 25 bp, Saccharomyces pastorianus
catttacccataacgcccacgatta

SEQ ID NO: 178525 - DNA, 25 bp, Saccharomyces pastorianus
ttacccataacgcccacgattatcc

SEQ ID NO: 178526 - DNA, 25 bp, Saccharomyces pastorianus
tttacccataacgcccacgattatc

SEQ ID NO: 178527 - DNA, 25 bp, Saccharomyces pastorianus
atttacccataacgcccacgattat

SEQ ID NO: 178528 - DNA, 25 bp, Saccharomyces pastorianus
tacccataacgcccacgattatcca

SEQ ID NO: 178529 - DNA, 25 bp, Saccharomyces pastorianus
ataacgcccacgattatccacattt

SEQ ID NO: 178530 - DNA, 25 bp, Saccharomyces pastorianus
cccataacgcccacgattatccaca

SEQ ID NO: 178531 - DNA, 25 bp, Saccharomyces pastorianus
acccataacgcccacgattatccac

SEQ ID NO: 178532 - DNA, 25 bp, Saccharomyces pastorianus
gccatttacccataacgcccacgat

SEQ ID NO: 178533 - DNA, 25 bp, Saccharomyces pastorianus
aacgcccacgattatccacatttta

SEQ ID NO: 178534 - DNA, 25 bp, Saccharomyces pastorianus
ccataacgcccacgattatccacat

SEQ ID NO: 178535 - DNA, 25 bp, Saccharomyces pastorianus
atatatactagaagttttcctcgag

SEQ ID NO: 178536 - DNA, 25 bp, Saccharomyces pastorianus
tcattccgttttattccttattccg

SEQ ID NO: 178537 - DNA, 25 bp, Saccharomyces pastorianus
tcctcaaaatggaatctgtatttct

SEQ ID NO: 178538 - DNA, 25 bp, Saccharomyces pastorianus
cagtatatatactagaagttttcct

SEQ ID NO: 178539 - DNA, 25 bp, Saccharomyces pastorianus
gtatatatactagaagttttcctcg

SEQ ID NO: 178540 - DNA, 25 bp, Saccharomyces pastorianus
tatatatactagaagttttcctcga

SEQ ID NO: 178541 - DNA, 25 bp, Saccharomyces pastorianus
agtatatatactagaagttttcctc

SEQ ID NO: 178542 - DNA, 25 bp, Saccharomyces pastorianus
gaagttttcctcgaggatataggaa

SEQ ID NO: 178543 - DNA, 25 bp, Saccharomyces pastorianus
acatactaatattaagattattcct

SEQ ID NO: 178544 - DNA, 25 bp, Saccharomyces pastorianus
tatatactagaagttttcctcgagg

SEQ ID NO: 178545 - DNA, 25 bp, Saccharomyces pastorianus
atatactagaagttttcctcgagga

SEQ ID NO: 178546 - DNA, 25 bp, Saccharomyces pastorianus
aattgtcatggaatttcccaaccca

SEQ ID NO: 178547 - DNA, 25 bp, Saccharomyces pastorianus
aagagtcagtcgaagcacaattgtc

SEQ ID NO: 178548 - DNA, 25 bp, Saccharomyces pastorianus
gtcgaagcacaattgtcatggaatt

SEQ ID NO: 178549 - DNA, 25 bp, Saccharomyces pastorianus
gagtcagtcgaagcacaattgtcat

SEQ ID NO: 178550 - DNA, 25 bp, Saccharomyces pastorianus
attgtcatggaatttcccaacccaa

SEQ ID NO: 178551 - DNA, 25 bp, Saccharomyces pastorianus
gtcagtcgaagcacaattgtcatgg

SEQ ID NO: 178552 - DNA, 25 bp, Saccharomyces pastorianus
cagtcgaagcacaattgtcatggaa

SEQ ID NO: 178553 - DNA, 25 bp, Saccharomyces pastorianus
aggaagagtcagtcgaagcacaatt

SEQ ID NO: 178554 - DNA, 25 bp, Saccharomyces pastorianus
agcacaattgtcatggaatttccca

SEQ ID NO: 178555 - DNA, 25 bp, Saccharomyces pastorianus
cacaattgtcatggaatttcccaac

SEQ ID NO: 178556 - DNA, 25 bp, Saccharomyces pastorianus
gaagcacaattgtcatggaatttcc

SEQ ID NO: 178557 - DNA, 25 bp, Saccharomyces pastorianus
aaatggattattgagctggctgaac

SEQ ID NO: 178558 - DNA, 25 bp, Saccharomyces pastorianus
ggctggttccatgcaacaacaagtt

SEQ ID NO: 178559 - DNA, 25 bp, Saccharomyces pastorianus
aagttactttgtatcctcacgtcga

SEQ ID NO: 178560 - DNA, 25 bp, Saccharomyces pastorianus
acggctgcaggttacactcacatga

SEQ ID NO: 178561 - DNA, 25 bp, Saccharomyces pastorianus
aaaaagatcagagccgggacctgcc

SEQ ID NO: 178562 - DNA, 25 bp, Saccharomyces pastorianus
aaacctccagtttctcaaaatgcgg

SEQ ID NO: 178563 - DNA, 25 bp, Saccharomyces pastorianus
ggttgttacttattttcacatcctg

SEQ ID NO: 178564 - DNA, 25 bp, Saccharomyces pastorianus
catgttatggatacgagggcttcga

SEQ ID NO: 178565 - DNA, 25 bp, Saccharomyces pastorianus
tgtatcctcacgtcgaccaaaataa

SEQ ID NO: 178566 - DNA, 25 bp, Saccharomyces pastorianus
tcatcttcacaattatccggctggt

SEQ ID NO: 178567 - DNA, 25 bp, Saccharomyces pastorianus
ggacctgcccaggaacatattaggg

SEQ ID NO: 178568 - DNA, 25 bp, Saccharomyces pastorianus
ggcaattaggacttggtacaaacat

SEQ ID NO: 178569 - DNA, 25 bp, Saccharomyces pastorianus
gtatccaaaagctaaagacgccctg

SEQ ID NO: 178570 - DNA, 25 bp, Saccharomyces pastorianus
ctgtctcaaaaaaggttaccgctgt

SEQ ID NO: 178571 - DNA, 25 bp, Saccharomyces pastorianus
aactagcttctagaggtttccgtgc

SEQ ID NO: 178572 - DNA, 25 bp, Saccharomyces pastorianus
aatcaatgaggccagaaaccttggt

SEQ ID NO: 178573 - DNA, 25 bp, Saccharomyces pastorianus
gatgacaccgctcaaacaatcaatg

SEQ ID NO: 178574 - DNA, 25 bp, Saccharomyces pastorianus
cggtgacgctgttggtatcgcgaaa

SEQ ID NO: 178575 - DNA, 25 bp, Saccharomyces pastorianus
agacgccctgaccaagtacaaagtt

SEQ ID NO: 178576 - DNA, 25 bp, Saccharomyces pastorianus
ttaccgctgttgtagaatccccaga

SEQ ID NO: 178577 - DNA, 25 bp, Saccharomyces pastorianus
gaagtcattgattgagtatccaaaa

SEQ ID NO: 178578 - DNA, 25 bp, Saccharomyces pastorianus
atgcctggttcagagttggctgatt

SEQ ID NO: 178579 - DNA, 25 bp, Saccharomyces pastorianus
agtaatctgtccgtcatcatcgtca

SEQ ID NO: 178580 - DNA, 25 bp, Saccharomyces pastorianus
gcatcacagcttatgcagtaatctg

SEQ ID NO: 178581 - DNA, 25 bp, Saccharomyces pastorianus
agattactgcatcacagcttatgca

SEQ ID NO: 178582 - DNA, 25 bp, Saccharomyces pastorianus
gcttatgcagtaatctgtccgtcat

SEQ ID NO: 178583 - DNA, 25 bp, Saccharomyces pastorianus
aaacaagattactgcatcacagctt

SEQ ID NO: 178584 - DNA, 25 bp, Saccharomyces pastorianus
tatgcagtaatctgtccgtcatcat

SEQ ID NO: 178585 - DNA, 25 bp, Saccharomyces pastorianus
tgcagtaatctgtccgtcatcatcg

SEQ ID NO: 178586 - DNA, 25 bp, Saccharomyces pastorianus
caagattactgcatcacagcttatg

SEQ ID NO: 178587 - DNA, 25 bp, Saccharomyces pastorianus
gtcatgatattaattctgcaaaaac

SEQ ID NO: 178588 - DNA, 25 bp, Saccharomyces pastorianus
cagcttatgcagtaatctgtccgtc

SEQ ID NO: 178589 - DNA, 25 bp, Saccharomyces pastorianus
cttttagtcatgatattaattctgc

SEQ ID NO: 178590 - DNA, 25 bp, Saccharomyces pastorianus
gtcacggttaaggttccagtcgcgg

SEQ ID NO: 178591 - DNA, 25 bp, Saccharomyces pastorianus
atgggtgctcatactttctacgtca

SEQ ID NO: 178592 - DNA, 25 bp, Saccharomyces pastorianus
gggcagcaagcatctcttggcagat

SEQ ID NO: 178593 - DNA, 25 bp, Saccharomyces pastorianus
gtaaccacccagcagaacatttcaa

SEQ ID NO: 178594 - DNA, 25 bp, Saccharomyces pastorianus
agtcgcgggaatacctcaccaaatt

SEQ ID NO: 178595 - DNA, 25 bp, Saccharomyces pastorianus
gcgagatcagcgctgtcaatgacaa

SEQ ID NO: 178596 - DNA, 25 bp, Saccharomyces pastorianus
agatggcagcaacctcgggcagcaa

SEQ ID NO: 178597 - DNA, 25 bp, Saccharomyces pastorianus
aagtacacgtcgttcatgggtgctc

SEQ ID NO: 178598 - DNA, 25 bp, Saccharomyces pastorianus
tttcaagaatcgaatgtcacggtta

SEQ ID NO: 178599 - DNA, 25 bp, Saccharomyces pastorianus
aggcatagaacaccgcttagagata

SEQ ID NO: 178600 - DNA, 25 bp, Saccharomyces pastorianus
tttctacgtcatcgcattgcccatg

SEQ ID NO: 178601 - DNA, 25 bp, Saccharomyces pastorianus
cccatctctctctaaatcagtacta

SEQ ID NO: 178602 - DNA, 25 bp, Saccharomyces pastorianus
atccatggcccatctctctctaaat

SEQ ID NO: 178603 - DNA, 25 bp, Saccharomyces pastorianus
ctctctctaaatcagtactaaatgc

SEQ ID NO: 178604 - DNA, 25 bp, Saccharomyces pastorianus
tctctctctaaatcagtactaaatg

SEQ ID NO: 178605 - DNA, 25 bp, Saccharomyces pastorianus
tctctctaaatcagtactaaatgca

SEQ ID NO: 178606 - DNA, 25 bp, Saccharomyces pastorianus
tctctaaatcagtactaaatgcact

SEQ ID NO: 178607 - DNA, 25 bp, Saccharomyces pastorianus
atttacccataacgcccacgattat

SEQ ID NO: 178608 - DNA, 25 bp, Saccharomyces pastorianus
ctctctaaatcagtactaaatgcac

SEQ ID NO: 178609 - DNA, 25 bp, Saccharomyces pastorianus
gccatttacccataacgcccacgat

SEQ ID NO: 178610 - DNA, 25 bp, Saccharomyces pastorianus
gcccatctctctctaaatcagtact

SEQ ID NO: 178611 - DNA, 25 bp, Saccharomyces pastorianus
ccatctctctctaaatcagtactaa

SEQ ID NO: 178612 - DNA, 25 bp, Saccharomyces pastorianus
ttacgtcaaaaagagatcccacaaa

SEQ ID NO: 178613 - DNA, 25 bp, Saccharomyces pastorianus
ggtaagttgttagccaaagttggtg

SEQ ID NO: 178614 - DNA, 25 bp, Saccharomyces pastorianus
ggatccaatgactacttacgtcaaa

SEQ ID NO: 178615 - DNA, 25 bp, Saccharomyces pastorianus
gtgaggatccaatgactacttacgt

SEQ ID NO: 178616 - DNA, 25 bp, Saccharomyces pastorianus
tagccaaagttggtgaggatccaat

SEQ ID NO: 178617 - DNA, 25 bp, Saccharomyces pastorianus
gctaagggtaagttgttagccaaag

SEQ ID NO: 178618 - DNA, 25 bp, Saccharomyces pastorianus
gactacttacgtcaaaaagagatcc

SEQ ID NO: 178619 - DNA, 25 bp, Saccharomyces pastorianus
gatccaatgactacttacgtcaaaa

SEQ ID NO: 178620 - DNA, 25 bp, Saccharomyces pastorianus
gaggatccaatgactacttacgtca

SEQ ID NO: 178621 - DNA, 25 bp, Saccharomyces pastorianus
gtcaaaaagagatcccacaaactga

SEQ ID NO: 178622 - DNA, 25 bp, Saccharomyces pastorianus
ggtgaggatccaatgactacttacg

SEQ ID NO: 178623 - DNA, 25 bp, Saccharomyces pastorianus
gacacggcagaagatcctgagatca

SEQ ID NO: 178624 - DNA, 25 bp, Saccharomyces pastorianus
tttcctttattaccttatttgcttg

SEQ ID NO: 178625 - DNA, 25 bp, Saccharomyces pastorianus
gaactctatcttccatcgcgttatt

SEQ ID NO: 178626 - DNA, 25 bp, Saccharomyces pastorianus
cttttaccagttgaccatttccagg

SEQ ID NO: 178627 - DNA, 25 bp, Saccharomyces pastorianus
gagatcacacacaaggtctactttg

SEQ ID NO: 178628 - DNA, 25 bp, Saccharomyces pastorianus
tgtctcttcacaacagccatttttg

SEQ ID NO: 178629 - DNA, 25 bp, Saccharomyces pastorianus
gggttatttgaactctatcttccat

SEQ ID NO: 178630 - DNA, 25 bp, Saccharomyces pastorianus
tgggattgtatggtctcaccacacc

SEQ ID NO: 178631 - DNA, 25 bp, Saccharomyces pastorianus
ttgaccatttccagggaccctaaga

SEQ ID NO: 178632 - DNA, 25 bp, Saccharomyces pastorianus
taccttatttgcttgtctcttcaca

SEQ ID NO: 178633 - DNA, 25 bp, Saccharomyces pastorianus
gccatttttgcgaaagaggacacgg

SEQ ID NO: 178634 - DNA, 25 bp, Saccharomyces pastorianus
ggtagaggtactttatttgtccgtg

SEQ ID NO: 178635 - DNA, 25 bp, Saccharomyces pastorianus
caggtagaggtactttatttgtccg

SEQ ID NO: 178636 - DNA, 25 bp, Saccharomyces pastorianus
tacccaggtagaggtactttatttg

SEQ ID NO: 178637 - DNA, 25 bp, Saccharomyces pastorianus
aaactccaaatctgcttcgacctgc

SEQ ID NO: 178638 - DNA, 25 bp, Saccharomyces pastorianus
gtccgtggtgactccaaaattttca

SEQ ID NO: 178639 - DNA, 25 bp, Saccharomyces pastorianus
gtagaggtactttatttgtccgtgg

SEQ ID NO: 178640 - DNA, 25 bp, Saccharomyces pastorianus
atctacccaggtagaggtactttat

SEQ ID NO: 178641 - DNA, 25 bp, Saccharomyces pastorianus
gtactttatttgtccgtggtgactc

SEQ ID NO: 178642 - DNA, 25 bp, Saccharomyces pastorianus
gactccaaaattttcagattccaaa

SEQ ID NO: 178643 - DNA, 25 bp, Saccharomyces pastorianus
tctacccaggtagaggtactttatt

SEQ ID NO: 178644 - DNA, 25 bp, Saccharomyces pastorianus
ttatttgtccgtggtgactccaaaa

SEQ ID NO: 178645 - DNA, 25 bp, Saccharomyces pastorianus
gtaaggctacacaatatctccctgc

SEQ ID NO: 178646 - DNA, 25 bp, Saccharomyces pastorianus
ggccctttgaggtcttttctcataa

SEQ ID NO: 178647 - DNA, 25 bp, Saccharomyces pastorianus
gtgtcctctgtttttggttataaag

SEQ ID NO: 178648 - DNA, 25 bp, Saccharomyces pastorianus
aatgctatatgcaaccgtgtcctct

SEQ ID NO: 178649 - DNA, 25 bp, Saccharomyces pastorianus
aatacacggcaaacgttccatacgt

SEQ ID NO: 178650 - DNA, 25 bp, Saccharomyces pastorianus
tacatttgtttctcaatacgtgaac

SEQ ID NO: 178651 - DNA, 25 bp, Saccharomyces pastorianus
atgttcatcctcctttagtggcaat

SEQ ID NO: 178652 - DNA, 25 bp, Saccharomyces pastorianus
cgatgtgactattaaacgcggccct

SEQ ID NO: 178653 - DNA, 25 bp, Saccharomyces pastorianus
atctccctgccaaatagtgttgttt

SEQ ID NO: 178654 - DNA, 25 bp, Saccharomyces pastorianus
atacgtcgcgatgaggttcttttct

SEQ ID NO: 178655 - DNA, 25 bp, Saccharomyces pastorianus
aggttcttttctgctactttgggca

SEQ ID NO: 178656 - DNA, 25 bp, Saccharomyces pastorianus
attgactccaatgcgcctattttat

SEQ ID NO: 178657 - DNA, 25 bp, Saccharomyces pastorianus
agttatcgacatgttttgtaccgct

SEQ ID NO: 178658 - DNA, 25 bp, Saccharomyces pastorianus
acttatatctatctggtggttttca

SEQ ID NO: 178659 - DNA, 25 bp, Saccharomyces pastorianus
aggttacggtgatgttcccactatc

SEQ ID NO: 178660 - DNA, 25 bp, Saccharomyces pastorianus
aaccaatgtctctatgttagcatac

SEQ ID NO: 178661 - DNA, 25 bp, Saccharomyces pastorianus
gttagcatacgcagcacttatatct

SEQ ID NO: 178662 - DNA, 25 bp, Saccharomyces pastorianus
aggaggcttccgaatctaaagtaga

SEQ ID NO: 178663 - DNA, 25 bp, Saccharomyces pastorianus
gtaccgctgctatggttaatttctc

SEQ ID NO: 178664 - DNA, 25 bp, Saccharomyces pastorianus
ccactatcgctagggaggaggcttc

SEQ ID NO: 178665 - DNA, 25 bp, Saccharomyces pastorianus
gcgcctattttatcattggacagtg

SEQ ID NO: 178666 - DNA, 25 bp, Saccharomyces pastorianus
gacagtgttcaccaataatccaaag

SEQ ID NO: 178667 - DNA, 25 bp, Saccharomyces pastorianus
gtgtagaattgcagattccatttta

SEQ ID NO: 178668 - DNA, 25 bp, Saccharomyces pastorianus
tgccttattaaaaatggaatcccaa

SEQ ID NO: 178669 - DNA, 25 bp, Saccharomyces pastorianus
tattgccttattaaaaatggaatcc

SEQ ID NO: 178670 - DNA, 25 bp, Saccharomyces pastorianus
ttgtgtagaattgcagattccattt

SEQ ID NO: 178671 - DNA, 25 bp, Saccharomyces pastorianus
tctagtacattctacatacctaata

SEQ ID NO: 178672 - DNA, 25 bp, Saccharomyces pastorianus
gtagaattgcagattccattttatg

SEQ ID NO: 178673 - DNA, 25 bp, Saccharomyces pastorianus
aacttctagtacattctacatacct

SEQ ID NO: 178674 - DNA, 25 bp, Saccharomyces pastorianus
tatggattcctaaatcctcgaggag

SEQ ID NO: 178675 - DNA, 25 bp, Saccharomyces pastorianus
aattgtgtagaattgcagattccat

SEQ ID NO: 178676 - DNA, 25 bp, Saccharomyces pastorianus
ctagtacattctacatacctaatat

SEQ ID NO: 178677 - DNA, 25 bp, Saccharomyces pastorianus
ttgccttattaaaaatggaatccca

SEQ ID NO: 178678 - DNA, 25 bp, Saccharomyces pastorianus
gatccaaaagtcagagagttctcca

SEQ ID NO: 178679 - DNA, 25 bp, Saccharomyces pastorianus
tctgttactttatagaatcacggaa

SEQ ID NO: 178680 - DNA, 25 bp, Saccharomyces pastorianus
ctccagatccgtggttcattaaaaa

SEQ ID NO: 178681 - DNA, 25 bp, Saccharomyces pastorianus
gaattattcttttctgttactttat

SEQ ID NO: 178682 - DNA, 25 bp, Saccharomyces pastorianus
tttcgtatcggttggattatactat

SEQ ID NO: 178683 - DNA, 25 bp, Saccharomyces pastorianus
aactatttttatctgtatacataca

SEQ ID NO: 178684 - DNA, 25 bp, Saccharomyces pastorianus
tttttgattttcgtatcggttggat

SEQ ID NO: 178685 - DNA, 25 bp, Saccharomyces pastorianus
ggcaactacatcatgttttttaact

SEQ ID NO: 178686 - DNA, 25 bp, Saccharomyces pastorianus
catacaaggaatagaaaacacgttt

SEQ ID NO: 178687 - DNA, 25 bp, Saccharomyces pastorianus
gatgaaggcaactacatcatgtttt

SEQ ID NO: 178688 - DNA, 25 bp, Saccharomyces pastorianus
agtcagagagttctccagatccgtg

SEQ ID NO: 178689 - DNA, 25 bp, Saccharomyces pastorianus
ggagcggctctcttctaatggtcgt

SEQ ID NO: 178690 - DNA, 25 bp, Saccharomyces pastorianus
ttgatcaacttttccaacttggcgt

SEQ ID NO: 178691 - DNA, 25 bp, Saccharomyces pastorianus
gccttgccactttgatttgggctta

SEQ ID NO: 178692 - DNA, 25 bp, Saccharomyces pastorianus
ggcttacattgatctacccgaaaca

SEQ ID NO: 178693 - DNA, 25 bp, Saccharomyces pastorianus
tcgtcgcgtttttctacaacctggg

SEQ ID NO: 178694 - DNA, 25 bp, Saccharomyces pastorianus
atattgtaccaactgaattccgaga

SEQ ID NO: 178695 - DNA, 25 bp, Saccharomyces pastorianus
ggactagcctttcagaccattatat

SEQ ID NO: 178696 - DNA, 25 bp, Saccharomyces pastorianus
tggaatgttcagacactcacggcgc

SEQ ID NO: 178697 - DNA, 25 bp, Saccharomyces pastorianus
ggaagtggatccgtttctcataaaa

SEQ ID NO: 178698 - DNA, 25 bp, Saccharomyces pastorianus
tggtgggcctctaagtactttggta

SEQ ID NO: 178699 - DNA, 25 bp, Saccharomyces pastorianus
gcactgatacagctttcacttttag

SEQ ID NO: 178700 - DNA, 25 bp, Saccharomyces pastorianus
tgaccgccgggtatttgacattatc

SEQ ID NO: 178701 - DNA, 25 bp, Saccharomyces pastorianus
gaaacgtgttcgtgagctctgcgac

SEQ ID NO: 178702 - DNA, 25 bp, Saccharomyces pastorianus
gtgaacgtcgaagtcctgcaagagc

SEQ ID NO: 178703 - DNA, 25 bp, Saccharomyces pastorianus
ataatctacattctgcctccatatg

SEQ ID NO: 178704 - DNA, 25 bp, Saccharomyces pastorianus
aatccgttagcatgcgctgttgcaa

SEQ ID NO: 178705 - DNA, 25 bp, Saccharomyces pastorianus
gaaccggcatgctctttgggtttca

SEQ ID NO: 178706 - DNA, 25 bp, Saccharomyces pastorianus
gagcatggattagacctttcggtaa

SEQ ID NO: 178707 - DNA, 25 bp, Saccharomyces pastorianus
gagggctgcttcatgcacggacaaa

SEQ ID NO: 178708 - DNA, 25 bp, Saccharomyces pastorianus
ttgttgatccttggcgaagtcgcag

SEQ ID NO: 178709 - DNA, 25 bp, Saccharomyces pastorianus
aaatgagcttttgcccttactggaa

SEQ ID NO: 178710 - DNA, 25 bp, Saccharomyces pastorianus
gagctctgcgacgaactcgatattt

SEQ ID NO: 178711 - DNA, 25 bp, Saccharomyces pastorianus
ccatggctcagttgtagttatgatg

SEQ ID NO: 178712 - DNA, 25 bp, Saccharomyces pastorianus
taccggtgacggtggtcatttctgt

SEQ ID NO: 178713 - DNA, 25 bp, Saccharomyces pastorianus
ggttcggtcgtagttatggcagtac

SEQ ID NO: 178714 - DNA, 25 bp, Saccharomyces pastorianus
cttgctggtagtaggtgtagtgaca

SEQ ID NO: 178715 - DNA, 25 bp, Saccharomyces pastorianus
tggcaaaccgttggtaccggtgacg

SEQ ID NO: 178716 - DNA, 25 bp, Saccharomyces pastorianus
gaaagtgccagtccatggctcagtt

SEQ ID NO: 178717 - DNA, 25 bp, Saccharomyces pastorianus
gtagaggtgaaagtgccagtccatg

SEQ ID NO: 178718 - DNA, 25 bp, Saccharomyces pastorianus
gacagtagtcatctcagtagacgta

SEQ ID NO: 178719 - DNA, 25 bp, Saccharomyces pastorianus
ttggtacaccgttggttccagtgac

SEQ ID NO: 178720 - DNA, 25 bp, Saccharomyces pastorianus
aagtgcgagtccatggttcggtcgt

SEQ ID NO: 178721 - DNA, 25 bp, Saccharomyces pastorianus
ccgttggttccagtgacagtagtca

SEQ ID NO: 178722 - DNA, 25 bp, Saccharomyces pastorianus
gaaagcgcagctgacttcgtcctca

SEQ ID NO: 178723 - DNA, 25 bp, Saccharomyces pastorianus
gcaagaacagcagtacgggccagta

SEQ ID NO: 178724 - DNA, 25 bp, Saccharomyces pastorianus
gggcgttggtgaccgcgctggaggg

SEQ ID NO: 178725 - DNA, 25 bp, Saccharomyces pastorianus
atcattgtggtttctaacagactgc

SEQ ID NO: 178726 - DNA, 25 bp, Saccharomyces pastorianus
gacaacgcgaaagcgcagctgactt

SEQ ID NO: 178727 - DNA, 25 bp, Saccharomyces pastorianus
atgactacagacaacgcgaaagcgc

SEQ ID NO: 178728 - DNA, 25 bp, Saccharomyces pastorianus
ttctaacagactgcctgtgaccatt

SEQ ID NO: 178729 - DNA, 25 bp, Saccharomyces pastorianus
ctgcctgtgaccattagcaagaaca

SEQ ID NO: 178730 - DNA, 25 bp, Saccharomyces pastorianus
acagactgcctgtgaccattagcaa

SEQ ID NO: 178731 - DNA, 25 bp, Saccharomyces pastorianus
agcgcagctgacttcgtcctcaggg

SEQ ID NO: 178732 - DNA, 25 bp, Saccharomyces pastorianus
gggcaacatcattgtggtttctaac

SEQ ID NO: 178733 - DNA, 25 bp, Saccharomyces pastorianus
taggtgcaatactttcgtccgtcat

SEQ ID NO: 178734 - DNA, 25 bp, Saccharomyces pastorianus
ataacactaccaacacattcttcaa

SEQ ID NO: 178735 - DNA, 25 bp, Saccharomyces pastorianus
gcgattgtcccgttgcaatattgtt

SEQ ID NO: 178736 - DNA, 25 bp, Saccharomyces pastorianus
gtaggatatggagaccacctcggtc

SEQ ID NO: 178737 - DNA, 25 bp, Saccharomyces pastorianus
tactttgctatgcagggctaacctt

SEQ ID NO: 178738 - DNA, 25 bp, Saccharomyces pastorianus
ggttcatgaccaccattgcatatgg

SEQ ID NO: 178739 - DNA, 25 bp, Saccharomyces pastorianus
aaaaaccctgtattccatcgtgtgg

SEQ ID NO: 178740 - DNA, 25 bp, Saccharomyces pastorianus
ctgttccacatgtaacgtctgcgta

SEQ ID NO: 178741 - DNA, 25 bp, Saccharomyces pastorianus
ggctaaccttatggtatccggcaat

SEQ ID NO: 178742 - DNA, 25 bp, Saccharomyces pastorianus
gcccaagctttgtaagtgccagaaa

SEQ ID NO: 178743 - DNA, 25 bp, Saccharomyces pastorianus
aattgtgccatccatattgcacggg

SEQ ID NO: 178744 - DNA, 25 bp, Saccharomyces pastorianus
gaattttagatatggaccctcgttc

SEQ ID NO: 178745 - DNA, 25 bp, Saccharomyces pastorianus
tttagatatggaccctcgttcagaa

SEQ ID NO: 178746 - DNA, 25 bp, Saccharomyces pastorianus
tatgttacccttttccgtgccgtgt

SEQ ID NO: 178747 - DNA, 25 bp, Saccharomyces pastorianus
tgccgtatgttacccttttccgtgc

SEQ ID NO: 178748 - DNA, 25 bp, Saccharomyces pastorianus
gtgccgtatgttacccttttccgtg

SEQ ID NO: 178749 - DNA, 25 bp, Saccharomyces pastorianus
gccgaggtgccgtatgttacccttt

SEQ ID NO: 178750 - DNA, 25 bp, Saccharomyces pastorianus
ggttgccgaggtgccgtatgttacc

SEQ ID NO: 178751 - DNA, 25 bp, Saccharomyces pastorianus
gtatgttacccttttccgtgccgtg

SEQ ID NO: 178752 - DNA, 25 bp, Saccharomyces pastorianus
ttgccgaggtgccgtatgttaccct

SEQ ID NO: 178753 - DNA, 25 bp, Saccharomyces pastorianus
tgccgaggtgccgtatgttaccctt

SEQ ID NO: 178754 - DNA, 25 bp, Saccharomyces pastorianus
gttgccgaggtgccgtatgttaccc

SEQ ID NO: 178755 - DNA, 25 bp, Saccharomyces pastorianus
agtggtgaagtccaactgcctgtga

SEQ ID NO: 178756 - DNA, 25 bp, Saccharomyces pastorianus
ggacaaattcagatttcgccagcat

SEQ ID NO: 178757 - DNA, 25 bp, Saccharomyces pastorianus
gaggagattccactactatcacgca

SEQ ID NO: 178758 - DNA, 25 bp, Saccharomyces pastorianus
actactatcacgcagattacaggaa

SEQ ID NO: 178759 - DNA, 25 bp, Saccharomyces pastorianus
tccaactgcctgtgaaaatgactat

SEQ ID NO: 178760 - DNA, 25 bp, Saccharomyces pastorianus
tgagcactttgttgatccgttgaat

SEQ ID NO: 178761 - DNA, 25 bp, Saccharomyces pastorianus
ctgacagggcggcttttgatttaac

SEQ ID NO: 178762 - DNA, 25 bp, Saccharomyces pastorianus
cagatttcgccagcatttgaagaat

SEQ ID NO: 178763 - DNA, 25 bp, Saccharomyces pastorianus
gatccgttgaataagtcacatgcaa

SEQ ID NO: 178764 - DNA, 25 bp, Saccharomyces pastorianus
gttttgtcaaaattttcccaggatg

SEQ ID NO: 178765 - DNA, 25 bp, Saccharomyces pastorianus
tgatttaactgtacactccaagaaa

SEQ ID NO: 178766 - DNA, 25 bp, Saccharomyces pastorianus
tgcaagcgcttatatccaagcaatg

SEQ ID NO: 178767 - DNA, 25 bp, Saccharomyces pastorianus
cgaagttattcgttatgcgactcag

SEQ ID NO: 178768 - DNA, 25 bp, Saccharomyces pastorianus
gaacgccctaatatggctttatttg

SEQ ID NO: 178769 - DNA, 25 bp, Saccharomyces pastorianus
gcctgataatgttgagaccagtatt

SEQ ID NO: 178770 - DNA, 25 bp, Saccharomyces pastorianus
tattcaaccctgcaagcgcttatat

SEQ ID NO: 178771 - DNA, 25 bp, Saccharomyces pastorianus
atcggataatccctgaagacattat

SEQ ID NO: 178772 - DNA, 25 bp, Saccharomyces pastorianus
tggcgaaagtcttaccacactcaag

SEQ ID NO: 178773 - DNA, 25 bp, Saccharomyces pastorianus
gtcacgagacattgatcacgattaa

SEQ ID NO: 178774 - DNA, 25 bp, Saccharomyces pastorianus
cattattccggaatgtcacgagaca

SEQ ID NO: 178775 - DNA, 25 bp, Saccharomyces pastorianus
gaagaagttctttatgcctgataat

SEQ ID NO: 178776 - DNA, 25 bp, Saccharomyces pastorianus
accgaggaagcttcctcctcattag

SEQ ID NO: 178777 - DNA, 25 bp, Saccharomyces pastorianus
aatccataaaagggaatctgctatt

SEQ ID NO: 178778 - DNA, 25 bp, Saccharomyces pastorianus
gaatccataaaagggaatctgctat

SEQ ID NO: 178779 - DNA, 25 bp, Saccharomyces pastorianus
cataaaagggaatctgctattctac

SEQ ID NO: 178780 - DNA, 25 bp, Saccharomyces pastorianus
aaagggaatctgctattctacacaa

SEQ ID NO: 178781 - DNA, 25 bp, Saccharomyces pastorianus
tccataaaagggaatctgctattct

SEQ ID NO: 178782 - DNA, 25 bp, Saccharomyces pastorianus
atccataaaagggaatctgctattc

SEQ ID NO: 178783 - DNA, 25 bp, Saccharomyces pastorianus
aaaagggaatctgctattctacaca

SEQ ID NO: 178784 - DNA, 25 bp, Saccharomyces pastorianus
ataaaagggaatctgctattctaca

SEQ ID NO: 178785 - DNA, 25 bp, Saccharomyces pastorianus
taaaagggaatctgctattctacac

SEQ ID NO: 178786 - DNA, 25 bp, Saccharomyces pastorianus
ccataaaagggaatctgctattcta

SEQ ID NO: 178787 - DNA, 25 bp, Saccharomyces pastorianus
tcgaggactttaggaatccataaaa

SEQ ID NO: 178788 - DNA, 25 bp, Saccharomyces pastorianus
ggttctttccatttaagcatttcta

SEQ ID NO: 178789 - DNA, 25 bp, Saccharomyces pastorianus
gaagcgctgttcaaatactatttta

SEQ ID NO: 178790 - DNA, 25 bp, Saccharomyces pastorianus
gagcagttctttaaccaacatggca

SEQ ID NO: 178791 - DNA, 25 bp, Saccharomyces pastorianus
gctgtaaatgtgtatccaatgctaa

SEQ ID NO: 178792 - DNA, 25 bp, Saccharomyces pastorianus
aaaagtttctcgcaatgatgtgtac

SEQ ID NO: 178793 - DNA, 25 bp, Saccharomyces pastorianus
gaccaggttctgttatatcccaatt

SEQ ID NO: 178794 - DNA, 25 bp, Saccharomyces pastorianus
cggcctgcgttcattcaacaattat

SEQ ID NO: 178795 - DNA, 25 bp, Saccharomyces pastorianus
atactaatcaattcgaagcgctgtt

SEQ ID NO: 178796 - DNA, 25 bp, Saccharomyces pastorianus
gaggagtcctctttatcacgattta

SEQ ID NO: 178797 - DNA, 25 bp, Saccharomyces pastorianus
ttgaaagacggtattgcgccccaat

SEQ ID NO: 178798 - DNA, 25 bp, Saccharomyces pastorianus
ggtaaaacccgattgcggcctgcgt

SEQ ID NO: 178799 - DNA, 25 bp, Saccharomyces pastorianus
gaaagtgctgctatgtctggtctta

SEQ ID NO: 178800 - DNA, 25 bp, Saccharomyces pastorianus
ataccacgtcatcgaagttgtcgcc

SEQ ID NO: 178801 - DNA, 25 bp, Saccharomyces pastorianus
aacgacgactatgaattctgctgca

SEQ ID NO: 178802 - DNA, 25 bp, Saccharomyces pastorianus
gcgtcgaacctgtagatttcaccgg

SEQ ID NO: 178803 - DNA, 25 bp, Saccharomyces pastorianus
ttactgggtctgttaacgagcctga

SEQ ID NO: 178804 - DNA, 25 bp, Saccharomyces pastorianus
agaagctcatccagcgatacgcatt

SEQ ID NO: 178805 - DNA, 25 bp, Saccharomyces pastorianus
tttttgttcttggatttgcggcctc

SEQ ID NO: 178806 - DNA, 25 bp, Saccharomyces pastorianus
actacatccatttaactggcccatg

SEQ ID NO: 178807 - DNA, 25 bp, Saccharomyces pastorianus
atcgttgccgagcagagacctgtac

SEQ ID NO: 178808 - DNA, 25 bp, Saccharomyces pastorianus
tcgccattttgggtatcacgctttt

SEQ ID NO: 178809 - DNA, 25 bp, Saccharomyces pastorianus
tatgctccgctttctgaattgtacg

SEQ ID NO: 178810 - DNA, 25 bp, Saccharomyces pastorianus
acagagagcactttttagacagtta

SEQ ID NO: 178811 - DNA, 25 bp, Saccharomyces pastorianus
gctggcaaatgtgagggcactgtat

SEQ ID NO: 178812 - DNA, 25 bp, Saccharomyces pastorianus
aatggcgtaattgcgctgggacaat

SEQ ID NO: 178813 - DNA, 25 bp, Saccharomyces pastorianus
gttgcacaggctattacagagagca

SEQ ID NO: 178814 - DNA, 25 bp, Saccharomyces pastorianus
gataacgtctataccaaagcctctg

SEQ ID NO: 178815 - DNA, 25 bp, Saccharomyces pastorianus
gagaagattacaagccaaacgcctt

SEQ ID NO: 178816 - DNA, 25 bp, Saccharomyces pastorianus
gaagatattggcaacaacgttcaag

SEQ ID NO: 178817 - DNA, 25 bp, Saccharomyces pastorianus
ggtactggcagttcaatggcgtaat

SEQ ID NO: 178818 - DNA, 25 bp, Saccharomyces pastorianus
tgtaacgttgggttgtacactagta

SEQ ID NO: 178819 - DNA, 25 bp, Saccharomyces pastorianus
ataacgctttttagctcgagaagat

SEQ ID NO: 178820 - DNA, 25 bp, Saccharomyces pastorianus
gtacactagtaacattgctggcaaa

SEQ ID NO: 178821 - DNA, 25 bp, Saccharomyces pastorianus
tcgattgttcccacggcaacagtaa

SEQ ID NO: 178822 - DNA, 25 bp, Saccharomyces pastorianus
gagaatagtctctgtggtgttatga

SEQ ID NO: 178823 - DNA, 25 bp, Saccharomyces pastorianus
ccaaccaaaggttgccaaatgtatt

SEQ ID NO: 178824 - DNA, 25 bp, Saccharomyces pastorianus
gatgcttgtattggctgggagtcca

SEQ ID NO: 178825 - DNA, 25 bp, Saccharomyces pastorianus
gtggtgttatgattgagtccaacat

SEQ ID NO: 178826 - DNA, 25 bp, Saccharomyces pastorianus
tttatgaccagctgacggagggtga

SEQ ID NO: 178827 - DNA, 25 bp, Saccharomyces pastorianus
gctgggagtccaccgaacaggtatt

SEQ ID NO: 178828 - DNA, 25 bp, Saccharomyces pastorianus
acaggtattggagctattggcagaa

SEQ ID NO: 178829 - DNA, 25 bp, Saccharomyces pastorianus
gatattcccaaagaaggtggcacag

SEQ ID NO: 178830 - DNA, 25 bp, Saccharomyces pastorianus
aaatgtatttatgaccagctgacgg

SEQ ID NO: 178831 - DNA, 25 bp, Saccharomyces pastorianus
atggttgttctgttacggatgcttg

SEQ ID NO: 178832 - DNA, 25 bp, Saccharomyces pastorianus
acatgggcgtccaatagcgcaagtg

SEQ ID NO: 178833 - DNA, 25 bp, Saccharomyces pastorianus
cttggataggcattgtaactgtata

SEQ ID NO: 178834 - DNA, 25 bp, Saccharomyces pastorianus
atgggcgtccaatagcgcaagtggt

SEQ ID NO: 178835 - DNA, 25 bp, Saccharomyces pastorianus
atcttggataggcattgtaactgta

SEQ ID NO: 178836 - DNA, 25 bp, Saccharomyces pastorianus
ggataggcattgtaactgtatattt

SEQ ID NO: 178837 - DNA, 25 bp, Saccharomyces pastorianus
atggacatgggcgtccaatagcgca

SEQ ID NO: 178838 - DNA, 25 bp, Saccharomyces pastorianus
gggcgtccaatagcgcaagtggtac

SEQ ID NO: 178839 - DNA, 25 bp, Saccharomyces pastorianus
gacatgggcgtccaatagcgcaagt

SEQ ID NO: 178840 - DNA, 25 bp, Saccharomyces pastorianus
tgggcgtccaatagcgcaagtggta

SEQ ID NO: 178841 - DNA, 25 bp, Saccharomyces pastorianus
tggacatgggcgtccaatagcgcaa

SEQ ID NO: 178842 - DNA, 25 bp, Saccharomyces pastorianus
tagagaatggacatgggcgtccaat

SEQ ID NO: 178843 - DNA, 25 bp, Saccharomyces pastorianus
tatacatgttttgcatccggcctaa

SEQ ID NO: 178844 - DNA, 25 bp, Saccharomyces pastorianus
aaaagcgcacaacactcaggtctat

SEQ ID NO: 178845 - DNA, 25 bp, Saccharomyces pastorianus
gctctgactctcctataggcaacaa

SEQ ID NO: 178846 - DNA, 25 bp, Saccharomyces pastorianus
ggcaaagttgttaccgcttatcgta

SEQ ID NO: 178847 - DNA, 25 bp, Saccharomyces pastorianus
gaaaccgacaaattcagctctgact

SEQ ID NO: 178848 - DNA, 25 bp, Saccharomyces pastorianus
tgacgatattgatcccgaagacata

SEQ ID NO: 178849 - DNA, 25 bp, Saccharomyces pastorianus
gaaaacttgccatctgctttttata

SEQ ID NO: 178850 - DNA, 25 bp, Saccharomyces pastorianus
tggtattggtgttcccctcttaatt

SEQ ID NO: 178851 - DNA, 25 bp, Saccharomyces pastorianus
aacagcttcagcgtcttcgaaaaaa

SEQ ID NO: 178852 - DNA, 25 bp, Saccharomyces pastorianus
ggcaccaatgatcaatattcgcctg

SEQ ID NO: 178853 - DNA, 25 bp, Saccharomyces pastorianus
gcctgctaaatctgcgtcatattcg

SEQ ID NO: 178854 - DNA, 25 bp, Saccharomyces pastorianus
tagtactggtgataacatattccgt

SEQ ID NO: 178855 - DNA, 25 bp, Saccharomyces pastorianus
aaacttggacggcttgacttataat

SEQ ID NO: 178856 - DNA, 25 bp, Saccharomyces pastorianus
tcgcctccgatgtcaaatacttcaa

SEQ ID NO: 178857 - DNA, 25 bp, Saccharomyces pastorianus
aataccataggcaacgatatccaaa

SEQ ID NO: 178858 - DNA, 25 bp, Saccharomyces pastorianus
caatttcctcctccaacgttaatat

SEQ ID NO: 178859 - DNA, 25 bp, Saccharomyces pastorianus
tgaaccttttttcctctaacagtgg

SEQ ID NO: 178860 - DNA, 25 bp, Saccharomyces pastorianus
tccaacgttaatatcgcctccgatg

SEQ ID NO: 178861 - DNA, 25 bp, Saccharomyces pastorianus
tcgtcacaacgaactctgcaaatgg

SEQ ID NO: 178862 - DNA, 25 bp, Saccharomyces pastorianus
actgctttcattttctccacaaaat

SEQ ID NO: 178863 - DNA, 25 bp, Saccharomyces pastorianus
aaatggcggatatcaatttcctcct

SEQ ID NO: 178864 - DNA, 25 bp, Saccharomyces pastorianus
aatggttcaccatccaggaaatacc

SEQ ID NO: 178865 - DNA, 25 bp, Saccharomyces pastorianus
gaatcggtcccttatttggcaagtg

SEQ ID NO: 178866 - DNA, 25 bp, Saccharomyces pastorianus
tcgaatcggtcccttatttggcaag

SEQ ID NO: 178867 - DNA, 25 bp, Saccharomyces pastorianus
aaggtgatgctatcgaatcggtccc

SEQ ID NO: 178868 - DNA, 25 bp, Saccharomyces pastorianus
atcggtcccttatttggcaagtgat

SEQ ID NO: 178869 - DNA, 25 bp, Saccharomyces pastorianus
aagaatgggaaggtgatgctatcga

SEQ ID NO: 178870 - DNA, 25 bp, Saccharomyces pastorianus
gatgctatcgaatcggtcccttatt

SEQ ID NO: 178871 - DNA, 25 bp, Saccharomyces pastorianus
ggtcccttatttggcaagtgatgaa

SEQ ID NO: 178872 - DNA, 25 bp, Saccharomyces pastorianus
gctatcgaatcggtcccttatttgg

SEQ ID NO: 178873 - DNA, 25 bp, Saccharomyces pastorianus
gtgatgctatcgaatcggtccctta

SEQ ID NO: 178874 - DNA, 25 bp, Saccharomyces pastorianus
tatcgaatcggtcccttatttggca

SEQ ID NO: 178875 - DNA, 25 bp, Saccharomyces pastorianus
tcccttatttggcaagtgatgaaaa

SEQ ID NO: 178876 - DNA, 25 bp, Saccharomyces pastorianus
ttcatcgatggcttccgggttcaaa

SEQ ID NO: 178877 - DNA, 25 bp, Saccharomyces pastorianus
atcatcttcaaagtccgggtttctt

SEQ ID NO: 178878 - DNA, 25 bp, Saccharomyces pastorianus
tcttcttctggagtaatggtcaagt

SEQ ID NO: 178879 - DNA, 25 bp, Saccharomyces pastorianus
ttcactttcagccttcttgccttta

SEQ ID NO: 178880 - DNA, 25 bp, Saccharomyces pastorianus
attgttggtattgggcttccggaga

SEQ ID NO: 178881 - DNA, 25 bp, Saccharomyces pastorianus
acggattcttggaactcatcgtcct

SEQ ID NO: 178882 - DNA, 25 bp, Saccharomyces pastorianus
ttcatcatcctcactttcactttca

SEQ ID NO: 178883 - DNA, 25 bp, Saccharomyces pastorianus
tcttaaagtcgatggtttgttctct

SEQ ID NO: 178884 - DNA, 25 bp, Saccharomyces pastorianus
ttcctcagaggattcttcgtctatt

SEQ ID NO: 178885 - DNA, 25 bp, Saccharomyces pastorianus
tcgtcttcatcaaaatcaccaccta

SEQ ID NO: 178886 - DNA, 25 bp, Saccharomyces pastorianus
ttccgggttcaaagcagccatagta

SEQ ID NO: 178887 - DNA, 25 bp, Saccharomyces pastorianus
ccatggtctattgatgaggctgcaa

SEQ ID NO: 178888 - DNA, 25 bp, Saccharomyces pastorianus
agtgatataacgtctttagcgaagg

SEQ ID NO: 178889 - DNA, 25 bp, Saccharomyces pastorianus
tgttcagtggtcatccttgtccagc

SEQ ID NO: 178890 - DNA, 25 bp, Saccharomyces pastorianus
taagaagcttctttcccatcaaaag

SEQ ID NO: 178891 - DNA, 25 bp, Saccharomyces pastorianus
agcacacgttaaccgaatcagattt

SEQ ID NO: 178892 - DNA, 25 bp, Saccharomyces pastorianus
ggtaaagattactgagggctattca

SEQ ID NO: 178893 - DNA, 25 bp, Saccharomyces pastorianus
ggaccagaccagacacgttcaattt

SEQ ID NO: 178894 - DNA, 25 bp, Saccharomyces pastorianus
atatatcccattaccagaggaccag

SEQ ID NO: 178895 - DNA, 25 bp, Saccharomyces pastorianus
agcgcagcggctggttcaaacaaaa

SEQ ID NO: 178896 - DNA, 25 bp, Saccharomyces pastorianus
gacaaacttaccatggtctattgat

SEQ ID NO: 178897 - DNA, 25 bp, Saccharomyces pastorianus
aacaattctgacaccaatggcgacg

SEQ ID NO: 178898 - DNA, 25 bp, Saccharomyces pastorianus
ggcgcctgatggagaacctgttctg

SEQ ID NO: 178899 - DNA, 25 bp, Saccharomyces pastorianus
gtttgtccgtcttatttgtcatgca

SEQ ID NO: 178900 - DNA, 25 bp, Saccharomyces pastorianus
tgttcacgttcataaggcgcctgat

SEQ ID NO: 178901 - DNA, 25 bp, Saccharomyces pastorianus
atatgtgcattaattccctgggtta

SEQ ID NO: 178902 - DNA, 25 bp, Saccharomyces pastorianus
attccctgggttaaagcatgcttcg

SEQ ID NO: 178903 - DNA, 25 bp, Saccharomyces pastorianus
gtcattcctattattggcgtcctat

SEQ ID NO: 178904 - DNA, 25 bp, Saccharomyces pastorianus
atgccgagtgctactgctcaagtat

SEQ ID NO: 178905 - DNA, 25 bp, Saccharomyces pastorianus
gatattaacgtggtccatgccgagt

SEQ ID NO: 178906 - DNA, 25 bp, Saccharomyces pastorianus
gcagtatgcgattcttttcatcact

SEQ ID NO: 178907 - DNA, 25 bp, Saccharomyces pastorianus
aaatccgccttattgatgacatgct

SEQ ID NO: 178908 - DNA, 25 bp, Saccharomyces pastorianus
gaaattaagtcattgccacctggat

SEQ ID NO: 178909 - DNA, 25 bp, Saccharomyces pastorianus
actatcgtctatcaactaatagtta

SEQ ID NO: 178910 - DNA, 25 bp, Saccharomyces pastorianus
aatccactatcgtctatcaactaat

SEQ ID NO: 178911 - DNA, 25 bp, Saccharomyces pastorianus
cgtatatgataatattgttggaata

SEQ ID NO: 178912 - DNA, 25 bp, Saccharomyces pastorianus
ccactatcgtctatcaactaatagt

SEQ ID NO: 178913 - DNA, 25 bp, Saccharomyces pastorianus
ataaaaatccactatcgtctatcaa

SEQ ID NO: 178914 - DNA, 25 bp, Saccharomyces pastorianus
ctatcgtctatcaactaatagttat

SEQ ID NO: 178915 - DNA, 25 bp, Saccharomyces pastorianus
tccactatcgtctatcaactaatag

SEQ ID NO: 178916 - DNA, 25 bp, Saccharomyces pastorianus
cactatcgtctatcaactaatagtt

SEQ ID NO: 178917 - DNA, 25 bp, Saccharomyces pastorianus
atccactatcgtctatcaactaata

SEQ ID NO: 178918 - DNA, 25 bp, Saccharomyces pastorianus
aataaaaatccactatcgtctatca

SEQ ID NO: 178919 - DNA, 25 bp, Saccharomyces pastorianus
gaataaaaatccactatcgtctatc

SEQ ID NO: 178920 - DNA, 25 bp, Saccharomyces pastorianus
atggcttgaccatatggaggcaaac

SEQ ID NO: 178921 - DNA, 25 bp, Saccharomyces pastorianus
ccatatggaggcaaacgatccttca

SEQ ID NO: 178922 - DNA, 25 bp, Saccharomyces pastorianus
ccagaattgtcccagctattatcaa

SEQ ID NO: 178923 - DNA, 25 bp, Saccharomyces pastorianus
aaccagaattgtcccagctattatc

SEQ ID NO: 178924 - DNA, 25 bp, Saccharomyces pastorianus
tgaccatatggaggcaaacgatcct

SEQ ID NO: 178925 - DNA, 25 bp, Saccharomyces pastorianus
ttgtcccagctattatcaatgtccg

SEQ ID NO: 178926 - DNA, 25 bp, Saccharomyces pastorianus
tttatgaaaccagaattgtcccagc

SEQ ID NO: 178927 - DNA, 25 bp, Saccharomyces pastorianus
gaattgtcccagctattatcaatgt

SEQ ID NO: 178928 - DNA, 25 bp, Saccharomyces pastorianus
gaaaccagaattgtcccagctatta

SEQ ID NO: 178929 - DNA, 25 bp, Saccharomyces pastorianus
atgaaaccagaattgtcccagctat

SEQ ID NO: 178930 - DNA, 25 bp, Saccharomyces pastorianus
gaatggcttgaccatatggaggcaa

SEQ ID NO: 178931 - DNA, 25 bp, Saccharomyces pastorianus
ggtatcactgtccaaacaattacaa

SEQ ID NO: 178932 - DNA, 25 bp, Saccharomyces pastorianus
acctcatgcggcgttactgaattta

SEQ ID NO: 178933 - DNA, 25 bp, Saccharomyces pastorianus
ggcgttactgaatttacttccttct

SEQ ID NO: 178934 - DNA, 25 bp, Saccharomyces pastorianus
ttacttccttcttcggtatcactgt

SEQ ID NO: 178935 - DNA, 25 bp, Saccharomyces pastorianus
tactgaatttacttccttcttcggt

SEQ ID NO: 178936 - DNA, 25 bp, Saccharomyces pastorianus
tctgctactacctcatgcggcgtta

SEQ ID NO: 178937 - DNA, 25 bp, Saccharomyces pastorianus
ccaagtgagccatggtcaaccttaa

SEQ ID NO: 178938 - DNA, 25 bp, Saccharomyces pastorianus
gagccatggtcaaccttaactcctt

SEQ ID NO: 178939 - DNA, 25 bp, Saccharomyces pastorianus
atgcggcgttactgaatttacttcc

SEQ ID NO: 178940 - DNA, 25 bp, Saccharomyces pastorianus
ttcttcggtatcactgtccaaacaa

SEQ ID NO: 178941 - DNA, 25 bp, Saccharomyces pastorianus
gaatttacttccttcttcggtatca

SEQ ID NO: 178942 - DNA, 25 bp, Saccharomyces pastorianus
taagtgcagggcgacaaaagttaac

SEQ ID NO: 178943 - DNA, 25 bp, Saccharomyces pastorianus
aaaatctcaaatggatcaggtggag

SEQ ID NO: 178944 - DNA, 25 bp, Saccharomyces pastorianus
ggcgacaaaagttaaccatcgaaca

SEQ ID NO: 178945 - DNA, 25 bp, Saccharomyces pastorianus
ttacgcaaggagctagacgaaattt

SEQ ID NO: 178946 - DNA, 25 bp, Saccharomyces pastorianus
gattacgcaaggagctagacgaaat

SEQ ID NO: 178947 - DNA, 25 bp, Saccharomyces pastorianus
cataagtggattacgcaaggagcta

SEQ ID NO: 178948 - DNA, 25 bp, Saccharomyces pastorianus
acaaaagcaggaaatcataagtgga

SEQ ID NO: 178949 - DNA, 25 bp, Saccharomyces pastorianus
atcataagtggattacgcaaggagc

SEQ ID NO: 178950 - DNA, 25 bp, Saccharomyces pastorianus
aagtggattacgcaaggagctagac

SEQ ID NO: 178951 - DNA, 25 bp, Saccharomyces pastorianus
aaagttaaccatcgaacaaaagcag

SEQ ID NO: 178952 - DNA, 25 bp, Saccharomyces pastorianus
gcaaggagctagacgaaatttattc

SEQ ID NO: 178953 - DNA, 25 bp, Saccharomyces pastorianus
ttcttcatcaagatcctcgatttcc

SEQ ID NO: 178954 - DNA, 25 bp, Saccharomyces pastorianus
gtcattgtcatcctgttcttcaaag

SEQ ID NO: 178955 - DNA, 25 bp, Saccharomyces pastorianus
gacagcgagttcatagatagtttgg

SEQ ID NO: 178956 - DNA, 25 bp, Saccharomyces pastorianus
aaaggcggcgaaatcttcttcatca

SEQ ID NO: 178957 - DNA, 25 bp, Saccharomyces pastorianus
attttcttcctcgtcatcattgtca

SEQ ID NO: 178958 - DNA, 25 bp, Saccharomyces pastorianus
atcctgttcttcaaaggcggcgaaa

SEQ ID NO: 178959 - DNA, 25 bp, Saccharomyces pastorianus
tctccttttctcgacatcgggatta

SEQ ID NO: 178960 - DNA, 25 bp, Saccharomyces pastorianus
taaagtcctcatcgtcattgtcatc

SEQ ID NO: 178961 - DNA, 25 bp, Saccharomyces pastorianus
gtcatcattgtcactgtcattgtca

SEQ ID NO: 178962 - DNA, 25 bp, Saccharomyces pastorianus
gaagaggaagatctctttctccttt

SEQ ID NO: 178963 - DNA, 25 bp, Saccharomyces pastorianus
atcgggattaaagtcctcatcgtca

SEQ ID NO: 178964 - DNA, 25 bp, Saccharomyces pastorianus
aacaaacaagtccagcaacagcagc

SEQ ID NO: 178965 - DNA, 25 bp, Saccharomyces pastorianus
tggtcaacaaacaagtccagcaaca

SEQ ID NO: 178966 - DNA, 25 bp, Saccharomyces pastorianus
gtcaacaaacaagtccagcaacagc

SEQ ID NO: 178967 - DNA, 25 bp, Saccharomyces pastorianus
aaacaagtccagcaacagcagcaaa

SEQ ID NO: 178968 - DNA, 25 bp, Saccharomyces pastorianus
acaaacaagtccagcaacagcagca

SEQ ID NO: 178969 - DNA, 25 bp, Saccharomyces pastorianus
tcaacaaacaagtccagcaacagca

SEQ ID NO: 178970 - DNA, 25 bp, Saccharomyces pastorianus
gcagcaaattcagcaacaacagcag

SEQ ID NO: 178971 - DNA, 25 bp, Saccharomyces pastorianus
acaagtccagcaacagcagcaaatt

SEQ ID NO: 178972 - DNA, 25 bp, Saccharomyces pastorianus
caaacaagtccagcaacagcagcaa

SEQ ID NO: 178973 - DNA, 25 bp, Saccharomyces pastorianus
caacaaacaagtccagcaacagcag

SEQ ID NO: 178974 - DNA, 25 bp, Saccharomyces pastorianus
ggtcaacaaacaagtccagcaacag

SEQ ID NO: 178975 - DNA, 25 bp, Saccharomyces pastorianus
tcgtggtttaatgactggtgttgag

SEQ ID NO: 178976 - DNA, 25 bp, Saccharomyces pastorianus
ggaggtgtctttagaattgcacccc

SEQ ID NO: 178977 - DNA, 25 bp, Saccharomyces pastorianus
ggactgtctgcaaatttgatatctg

SEQ ID NO: 178978 - DNA, 25 bp, Saccharomyces pastorianus
aagctagcggacaggatgatggaac

SEQ ID NO: 178979 - DNA, 25 bp, Saccharomyces pastorianus
gatgatggaacttggactgtctgca

SEQ ID NO: 178980 - DNA, 25 bp, Saccharomyces pastorianus
atttgatatctgttcctgcgtttgg

SEQ ID NO: 178981 - DNA, 25 bp, Saccharomyces pastorianus
gaaaattctgcaaacatgggtgatc

SEQ ID NO: 178982 - DNA, 25 bp, Saccharomyces pastorianus
acatgggtgatctatttaggtcaga

SEQ ID NO: 178983 - DNA, 25 bp, Saccharomyces pastorianus
tgagattatcaagccggaaaccaga

SEQ ID NO: 178984 - DNA, 25 bp, Saccharomyces pastorianus
ttcctgcgtttggaggtgtctttag

SEQ ID NO: 178985 - DNA, 25 bp, Saccharomyces pastorianus
cccctatcaccatttctaaagaaga

SEQ ID NO: 178986 - DNA, 25 bp, Saccharomyces pastorianus
gttccagcaacagtatttgtcccaa

SEQ ID NO: 178987 - DNA, 25 bp, Saccharomyces pastorianus
aacagcagcaacaattcgctcaaca

SEQ ID NO: 178988 - DNA, 25 bp, Saccharomyces pastorianus
tcaatcacagcaaagtccacaaagt

SEQ ID NO: 178989 - DNA, 25 bp, Saccharomyces pastorianus
aacagcatcagttccagcaacagta

SEQ ID NO: 178990 - DNA, 25 bp, Saccharomyces pastorianus
gcaacagtatttgtcccaacaacaa

SEQ ID NO: 178991 - DNA, 25 bp, Saccharomyces pastorianus
caacaaccagtacaagctcaagctc

SEQ ID NO: 178992 - DNA, 25 bp, Saccharomyces pastorianus
acaacctcaatcacagcaaagtcca

SEQ ID NO: 178993 - DNA, 25 bp, Saccharomyces pastorianus
gcaacaacaaccagtacaagctcaa

SEQ ID NO: 178994 - DNA, 25 bp, Saccharomyces pastorianus
aacaattcgctcaacaacagcatca

SEQ ID NO: 178995 - DNA, 25 bp, Saccharomyces pastorianus
caacctcaatcacaacaacctcaat

SEQ ID NO: 178996 - DNA, 25 bp, Saccharomyces pastorianus
aagctcaagcccaagaagaacaatt

SEQ ID NO: 178997 - DNA, 25 bp, Saccharomyces pastorianus
agctctttggaagactcattacctt

SEQ ID NO: 178998 - DNA, 25 bp, Saccharomyces pastorianus
aagaatgtcctgagtcttgtagctc

SEQ ID NO: 178999 - DNA, 25 bp, Saccharomyces pastorianus
gaatctactgatttcagctctttgg

SEQ ID NO: 179000 - DNA, 25 bp, Saccharomyces pastorianus
gtcttgtagctcactatttgaccta

SEQ ID NO: 179001 - DNA, 25 bp, Saccharomyces pastorianus
gctacccaaagtcactcatcagaat

SEQ ID NO: 179002 - DNA, 25 bp, Saccharomyces pastorianus
aaaatcgtagatcttggcctacaaa

SEQ ID NO: 179003 - DNA, 25 bp, Saccharomyces pastorianus
ttcaaacaccctatggaaccattag

SEQ ID NO: 179004 - DNA, 25 bp, Saccharomyces pastorianus
gactcattaccttctagtatctctc

SEQ ID NO: 179005 - DNA, 25 bp, Saccharomyces pastorianus
tctctcctcctatacagacaacaag

SEQ ID NO: 179006 - DNA, 25 bp, Saccharomyces pastorianus
gaaggatcatgtctctcaagatttc

SEQ ID NO: 179007 - DNA, 25 bp, Saccharomyces pastorianus
ggaggactgtgatatccttggagat

SEQ ID NO: 179008 - DNA, 25 bp, Saccharomyces pastorianus
ttctacctaagtttttctccattca

SEQ ID NO: 179009 - DNA, 25 bp, Saccharomyces pastorianus
aagatctcttggtctctttgacatt

SEQ ID NO: 179010 - DNA, 25 bp, Saccharomyces pastorianus
ttgaagctttagactcagatcagga

SEQ ID NO: 179011 - DNA, 25 bp, Saccharomyces pastorianus
gcatggatggccttccagagagtaa

SEQ ID NO: 179012 - DNA, 25 bp, Saccharomyces pastorianus
agggctcagggctacgcagatgatt

SEQ ID NO: 179013 - DNA, 25 bp, Saccharomyces pastorianus
tctgaagagcatttggagctaacaa

SEQ ID NO: 179014 - DNA, 25 bp, Saccharomyces pastorianus
ggcctatccgactgcactttatgaa

SEQ ID NO: 179015 - DNA, 25 bp, Saccharomyces pastorianus
aactgaagatccatgggcctatccg

SEQ ID NO: 179016 - DNA, 25 bp, Saccharomyces pastorianus
taaagaatggttactgagggctcag

SEQ ID NO: 179017 - DNA, 25 bp, Saccharomyces pastorianus
gaaatcccgccattgaagctttaga

SEQ ID NO: 179018 - DNA, 25 bp, Saccharomyces pastorianus
taactgagtatagaaatcccgccat

SEQ ID NO: 179019 - DNA, 25 bp, Saccharomyces pastorianus
aatcaaggatcccaactcggttttg

SEQ ID NO: 179020 - DNA, 25 bp, Saccharomyces pastorianus
cgatttcgagtttattgatttagac

SEQ ID NO: 179021 - DNA, 25 bp, Saccharomyces pastorianus
cattgcccttatctccagggaccat

SEQ ID NO: 179022 - DNA, 25 bp, Saccharomyces pastorianus
atgaaatcaaggatcccaactcggt

SEQ ID NO: 179023 - DNA, 25 bp, Saccharomyces pastorianus
ctgtgtacggatacgatttcgagtt

SEQ ID NO: 179024 - DNA, 25 bp, Saccharomyces pastorianus
gaaaggcgcataaagacattactgt

SEQ ID NO: 179025 - DNA, 25 bp, Saccharomyces pastorianus
tttcagagaaggcattaacgtcgaa

SEQ ID NO: 179026 - DNA, 25 bp, Saccharomyces pastorianus
aagacattactgtgtacggatacga

SEQ ID NO: 179027 - DNA, 25 bp, Saccharomyces pastorianus
ggcattaacgtcgaagatgaaatca

SEQ ID NO: 179028 - DNA, 25 bp, Saccharomyces pastorianus
aagccattgcccttatctccaggga

SEQ ID NO: 179029 - DNA, 25 bp, Saccharomyces pastorianus
gaagttgtttagcttcacaaagaag

SEQ ID NO: 179030 - DNA, 25 bp, Saccharomyces pastorianus
aatgcaaccgcttggattaactcaa

SEQ ID NO: 179031 - DNA, 25 bp, Saccharomyces pastorianus
gacactagattattaacaacactcg

SEQ ID NO: 179032 - DNA, 25 bp, Saccharomyces pastorianus
gtatatccactactcaacatgttgg

SEQ ID NO: 179033 - DNA, 25 bp, Saccharomyces pastorianus
gtgattacacacttaatatctctgt

SEQ ID NO: 179034 - DNA, 25 bp, Saccharomyces pastorianus
aacactcgagaatgcaaccgcttgg

SEQ ID NO: 179035 - DNA, 25 bp, Saccharomyces pastorianus
cactaacgtagcagaccggcttgat

SEQ ID NO: 179036 - DNA, 25 bp, Saccharomyces pastorianus
accgaatccaatacgtatatccact

SEQ ID NO: 179037 - DNA, 25 bp, Saccharomyces pastorianus
gggcacaagtgattacacacttaat

SEQ ID NO: 179038 - DNA, 25 bp, Saccharomyces pastorianus
cagagaaattggttgacactagatt

SEQ ID NO: 179039 - DNA, 25 bp, Saccharomyces pastorianus
gcttggattaactcaaactctattg

SEQ ID NO: 179040 - DNA, 25 bp, Saccharomyces pastorianus
gcatggctaaattctaccgaatcca

SEQ ID NO: 179041 - DNA, 25 bp, Saccharomyces pastorianus
agacaataattcgtttcctcctcac

SEQ ID NO: 179042 - DNA, 25 bp, Saccharomyces pastorianus
ttgtttctacaatcatccctcgtcg

SEQ ID NO: 179043 - DNA, 25 bp, Saccharomyces pastorianus
gggaatttcccaagcttctgatatt

SEQ ID NO: 179044 - DNA, 25 bp, Saccharomyces pastorianus
tttcctcctcacttttacttagatg

SEQ ID NO: 179045 - DNA, 25 bp, Saccharomyces pastorianus
tttcaatctacttcattctcgagcg

SEQ ID NO: 179046 - DNA, 25 bp, Saccharomyces pastorianus
atgacgctttgattgatcatcacag

SEQ ID NO: 179047 - DNA, 25 bp, Saccharomyces pastorianus
tattggattcccattgtttctacaa

SEQ ID NO: 179048 - DNA, 25 bp, Saccharomyces pastorianus
ctcgtcgccgaattttcaatctact

SEQ ID NO: 179049 - DNA, 25 bp, Saccharomyces pastorianus
agcgcagctcctttctcgggaattt

SEQ ID NO: 179050 - DNA, 25 bp, Saccharomyces pastorianus
ctgcatgtctcagtgatgacgcttt

SEQ ID NO: 179051 - DNA, 25 bp, Saccharomyces pastorianus
aatactttcagttcatctccaccca

SEQ ID NO: 179052 - DNA, 25 bp, Saccharomyces pastorianus
aaggcattgcaaccatacagtacaa

SEQ ID NO: 179053 - DNA, 25 bp, Saccharomyces pastorianus
aaattattcaggaaattcgatacta

SEQ ID NO: 179054 - DNA, 25 bp, Saccharomyces pastorianus
gtacaaagattttatcgatgctaca

SEQ ID NO: 179055 - DNA, 25 bp, Saccharomyces pastorianus
attgcaaccatacagtacaaagatt

SEQ ID NO: 179056 - DNA, 25 bp, Saccharomyces pastorianus
ggcattgcaaccatacagtacaaag

SEQ ID NO: 179057 - DNA, 25 bp, Saccharomyces pastorianus
gaaggcattgcaaccatacagtaca

SEQ ID NO: 179058 - DNA, 25 bp, Saccharomyces pastorianus
actaatcaagaaggcattgcaacca

SEQ ID NO: 179059 - DNA, 25 bp, Saccharomyces pastorianus
attcgatactaatcaagaaggcatt

SEQ ID NO: 179060 - DNA, 25 bp, Saccharomyces pastorianus
agaaggcattgcaaccatacagtac

SEQ ID NO: 179061 - DNA, 25 bp, Saccharomyces pastorianus
gcaaccatacagtacaaagatttta

SEQ ID NO: 179062 - DNA, 25 bp, Saccharomyces pastorianus
ttcaggaaattcgatactaatcaag

SEQ ID NO: 179063 - DNA, 25 bp, Saccharomyces pastorianus
gcaatcggtagcgcgtatgactctt

SEQ ID NO: 179064 - DNA, 25 bp, Saccharomyces pastorianus
atcggtagcgcgtatgactcttaat

SEQ ID NO: 179065 - DNA, 25 bp, Saccharomyces pastorianus
tcggtagcgcgtatgactcttaatc

SEQ ID NO: 179066 - DNA, 25 bp, Saccharomyces pastorianus
ggcgcaatcggtagcgcgtatgact

SEQ ID NO: 179067 - DNA, 25 bp, Saccharomyces pastorianus
cttgttggcgcaatcggtagcgcgt

SEQ ID NO: 179068 - DNA, 25 bp, Saccharomyces pastorianus
ttggcgcaatcggtagcgcgtatga

SEQ ID NO: 179069 - DNA, 25 bp, Saccharomyces pastorianus
gcgcaatcggtagcgcgtatgactc

SEQ ID NO: 179070 - DNA, 25 bp, Saccharomyces pastorianus
ttgttggcgcaatcggtagcgcgta

SEQ ID NO: 179071 - DNA, 25 bp, Saccharomyces pastorianus
aatcggtagcgcgtatgactcttaa

SEQ ID NO: 179072 - DNA, 25 bp, Saccharomyces pastorianus
ccttgttggcgcaatcggtagcgcg

SEQ ID NO: 179073 - DNA, 25 bp, Saccharomyces pastorianus
ggtagcgcgtatgactcttaatcat

SEQ ID NO: 179074 - DNA, 25 bp, Saccharomyces pastorianus
gcaccactgactgaaatgcaaatat

SEQ ID NO: 179075 - DNA, 25 bp, Saccharomyces pastorianus
ctcgaagtcatttggaatggaacca

SEQ ID NO: 179076 - DNA, 25 bp, Saccharomyces pastorianus
ggtatctcgaagtcatttggaatgg

SEQ ID NO: 179077 - DNA, 25 bp, Saccharomyces pastorianus
caccactgactgaaatgcaaatata

SEQ ID NO: 179078 - DNA, 25 bp, Saccharomyces pastorianus
aggtatctcgaagtcatttggaatg

SEQ ID NO: 179079 - DNA, 25 bp, Saccharomyces pastorianus
atctcgaagtcatttggaatggaac

SEQ ID NO: 179080 - DNA, 25 bp, Saccharomyces pastorianus
gaagtcatttggaatggaaccagca

SEQ ID NO: 179081 - DNA, 25 bp, Saccharomyces pastorianus
gtatctcgaagtcatttggaatgga

SEQ ID NO: 179082 - DNA, 25 bp, Saccharomyces pastorianus
agcaccactgactgaaatgcaaata

SEQ ID NO: 179083 - DNA, 25 bp, Saccharomyces pastorianus
ccactgactgaaatgcaaatatata

SEQ ID NO: 179084 - DNA, 25 bp, Saccharomyces pastorianus
ggaaccagcaccactgactgaaatg

SEQ ID NO: 179085 - DNA, 25 bp, Saccharomyces pastorianus
ggacgtccaaattccattgctgcat

SEQ ID NO: 179086 - DNA, 25 bp, Saccharomyces pastorianus
gcatcatctgcaggttcgttatttt

SEQ ID NO: 179087 - DNA, 25 bp, Saccharomyces pastorianus
ggagaactttcagccacaacttcat

SEQ ID NO: 179088 - DNA, 25 bp, Saccharomyces pastorianus
gatggtggtttcattctccaaagcc

SEQ ID NO: 179089 - DNA, 25 bp, Saccharomyces pastorianus
atgtgtatcggtatcctcacttttc

SEQ ID NO: 179090 - DNA, 25 bp, Saccharomyces pastorianus
gagtaccaacaggttcgcttttcaa

SEQ ID NO: 179091 - DNA, 25 bp, Saccharomyces pastorianus
tcccgttgcttcttcatttggagaa

SEQ ID NO: 179092 - DNA, 25 bp, Saccharomyces pastorianus
tattttcatctgctacttcggctac

SEQ ID NO: 179093 - DNA, 25 bp, Saccharomyces pastorianus
agcttccgaaggattaccctcattg

SEQ ID NO: 179094 - DNA, 25 bp, Saccharomyces pastorianus
tcagctacttcttcagtctgtacaa

SEQ ID NO: 179095 - DNA, 25 bp, Saccharomyces pastorianus
gtgtcctcgggcatcttattttcat

SEQ ID NO: 179096 - DNA, 25 bp, Saccharomyces pastorianus
actctcactttccactccatcaccc

SEQ ID NO: 179097 - DNA, 25 bp, Saccharomyces pastorianus
tctcactttccactccatcacccat

SEQ ID NO: 179098 - DNA, 25 bp, Saccharomyces pastorianus
cactttccactccatcacccatctc

SEQ ID NO: 179099 - DNA, 25 bp, Saccharomyces pastorianus
actttccactccatcacccatctct

SEQ ID NO: 179100 - DNA, 25 bp, Saccharomyces pastorianus
tcactttccactccatcacccatct

SEQ ID NO: 179101 - DNA, 25 bp, Saccharomyces pastorianus
ctactctcactttccactccatcac

SEQ ID NO: 179102 - DNA, 25 bp, Saccharomyces pastorianus
ctctcactttccactccatcaccca

SEQ ID NO: 179103 - DNA, 25 bp, Saccharomyces pastorianus
tactctcactttccactccatcacc

SEQ ID NO: 179104 - DNA, 25 bp, Saccharomyces pastorianus
ccatcacccatctctcaccatcagt

SEQ ID NO: 179105 - DNA, 25 bp, Saccharomyces pastorianus
cctactctcactttccactccatca

SEQ ID NO: 179106 - DNA, 25 bp, Saccharomyces pastorianus
tttccactccatcacccatctctca

SEQ ID NO: 179107 - DNA, 25 bp, Saccharomyces pastorianus
gaaaactttgatggatacgtagaat

SEQ ID NO: 179108 - DNA, 25 bp, Saccharomyces pastorianus
ttgatgcacggaacaggagatgata

SEQ ID NO: 179109 - DNA, 25 bp, Saccharomyces pastorianus
ggatacgtagaatcaagcgttcata

SEQ ID NO: 179110 - DNA, 25 bp, Saccharomyces pastorianus
gattttacgattctgtttatactga

SEQ ID NO: 179111 - DNA, 25 bp, Saccharomyces pastorianus
tgataacgttcactttcaaaattcc

SEQ ID NO: 179112 - DNA, 25 bp, Saccharomyces pastorianus
gctttggcacaagcaaatagatttt

SEQ ID NO: 179113 - DNA, 25 bp, Saccharomyces pastorianus
gagaggtacatgcatactcctcaag

SEQ ID NO: 179114 - DNA, 25 bp, Saccharomyces pastorianus
caagcgttcataatgtcactgcttt

SEQ ID NO: 179115 - DNA, 25 bp, Saccharomyces pastorianus
aatagatttttgttgatgcacggaa

SEQ ID NO: 179116 - DNA, 25 bp, Saccharomyces pastorianus
ggagatgataacgttcactttcaaa

SEQ ID NO: 179117 - DNA, 25 bp, Saccharomyces pastorianus
gactggagattttacgattctgttt

SEQ ID NO: 179118 - DNA, 25 bp, Saccharomyces pastorianus
tgagggctttatatttgggtgcagt

SEQ ID NO: 179119 - DNA, 25 bp, Saccharomyces pastorianus
gaatttgtcacagagaggtcttctg

SEQ ID NO: 179120 - DNA, 25 bp, Saccharomyces pastorianus
cattgacaaagcgactggccaagaa

SEQ ID NO: 179121 - DNA, 25 bp, Saccharomyces pastorianus
cgctgagggcaatgaggtcgtaaaa

SEQ ID NO: 179122 - DNA, 25 bp, Saccharomyces pastorianus
agtcgattcgttaccgagtttggtg

SEQ ID NO: 179123 - DNA, 25 bp, Saccharomyces pastorianus
tagctgctaaccacacgatccatgg

SEQ ID NO: 179124 - DNA, 25 bp, Saccharomyces pastorianus
ggatgctgtctctgaagagcctttt

SEQ ID NO: 179125 - DNA, 25 bp, Saccharomyces pastorianus
acacatttaatgacgctgagggcaa

SEQ ID NO: 179126 - DNA, 25 bp, Saccharomyces pastorianus
ggtcttctgaaggtagtcgattcgt

SEQ ID NO: 179127 - DNA, 25 bp, Saccharomyces pastorianus
accacacgatccatggtgtcatttt

SEQ ID NO: 179128 - DNA, 25 bp, Saccharomyces pastorianus
gccttttatcgaatggctagctgct

SEQ ID NO: 179129 - DNA, 25 bp, Saccharomyces pastorianus
gagtttacgaatcctacggatgtta

SEQ ID NO: 179130 - DNA, 25 bp, Saccharomyces pastorianus
tagagtttacgaatcctacggatgt

SEQ ID NO: 179131 - DNA, 25 bp, Saccharomyces pastorianus
tatgtgatcatggaatagagtttac

SEQ ID NO: 179132 - DNA, 25 bp, Saccharomyces pastorianus
atagaataaattcgctgttcagtgg

SEQ ID NO: 179133 - DNA, 25 bp, Saccharomyces pastorianus
aataaattcgctgttcagtggtaag

SEQ ID NO: 179134 - DNA, 25 bp, Saccharomyces pastorianus
gtttacgaatcctacggatgttaat

SEQ ID NO: 179135 - DNA, 25 bp, Saccharomyces pastorianus
gaataaattcgctgttcagtggtaa

SEQ ID NO: 179136 - DNA, 25 bp, Saccharomyces pastorianus
ggaatagagtttacgaatcctacgg

SEQ ID NO: 179137 - DNA, 25 bp, Saccharomyces pastorianus
gaatcctacggatgttaatagaata

SEQ ID NO: 179138 - DNA, 25 bp, Saccharomyces pastorianus
aatagagtttacgaatcctacggat

SEQ ID NO: 179139 - DNA, 25 bp, Saccharomyces pastorianus
ttacgaatcctacggatgttaatag

SEQ ID NO: 179140 - DNA, 25 bp, Saccharomyces pastorianus
tgcttaattatgctggtgctgccct

SEQ ID NO: 179141 - DNA, 25 bp, Saccharomyces pastorianus
gcaccatcctaaattgttctctttc

SEQ ID NO: 179142 - DNA, 25 bp, Saccharomyces pastorianus
gattgttccaactactcggctggca

SEQ ID NO: 179143 - DNA, 25 bp, Saccharomyces pastorianus
gactggcgcgaaatggcttaacttt

SEQ ID NO: 179144 - DNA, 25 bp, Saccharomyces pastorianus
tggcttaactttggcagcggtccca

SEQ ID NO: 179145 - DNA, 25 bp, Saccharomyces pastorianus
aagagcaacacccaaaagtcgccat

SEQ ID NO: 179146 - DNA, 25 bp, Saccharomyces pastorianus
aaaagccatgtgttctcgctgtgct

SEQ ID NO: 179147 - DNA, 25 bp, Saccharomyces pastorianus
accagaccattgatctataccgatt

SEQ ID NO: 179148 - DNA, 25 bp, Saccharomyces pastorianus
gcggtcccatttatcttagtgcgta

SEQ ID NO: 179149 - DNA, 25 bp, Saccharomyces pastorianus
cagtcgcataatggccctcttgaag

SEQ ID NO: 179150 - DNA, 25 bp, Saccharomyces pastorianus
ttcccactctattcggcttttagaa

SEQ ID NO: 179151 - DNA, 25 bp, Saccharomyces pastorianus
aaaggggaagcgatatttctacata

SEQ ID NO: 179152 - DNA, 25 bp, Saccharomyces pastorianus
agaggaatcctcaaaggggaagcga

SEQ ID NO: 179153 - DNA, 25 bp, Saccharomyces pastorianus
ggaatcctcaaaggggaagcgatat

SEQ ID NO: 179154 - DNA, 25 bp, Saccharomyces pastorianus
ctcaaaggggaagcgatatttctac

SEQ ID NO: 179155 - DNA, 25 bp, Saccharomyces pastorianus
tcctcaaaggggaagcgatatttct

SEQ ID NO: 179156 - DNA, 25 bp, Saccharomyces pastorianus
atcctcaaaggggaagcgatatttc

SEQ ID NO: 179157 - DNA, 25 bp, Saccharomyces pastorianus
caaaggggaagcgatatttctacat

SEQ ID NO: 179158 - DNA, 25 bp, Saccharomyces pastorianus
ctcgagggtagaggaatcctcaaag

SEQ ID NO: 179159 - DNA, 25 bp, Saccharomyces pastorianus
gaggaatcctcaaaggggaagcgat

SEQ ID NO: 179160 - DNA, 25 bp, Saccharomyces pastorianus
tcgagggtagaggaatcctcaaagg

SEQ ID NO: 179161 - DNA, 25 bp, Saccharomyces pastorianus
cgagggtagaggaatcctcaaaggg

SEQ ID NO: 179162 - DNA, 25 bp, Saccharomyces pastorianus
gaattgggtcttgtcccacactaaa

SEQ ID NO: 179163 - DNA, 25 bp, Saccharomyces pastorianus
tggtgcccgtttgctgactgtaaat

SEQ ID NO: 179164 - DNA, 25 bp, Saccharomyces pastorianus
gatgggacatccttcgagtagtaag

SEQ ID NO: 179165 - DNA, 25 bp, Saccharomyces pastorianus
actgttccctggcattgaaaaatga

SEQ ID NO: 179166 - DNA, 25 bp, Saccharomyces pastorianus
ttctgttggatttgtgagggcccct

SEQ ID NO: 179167 - DNA, 25 bp, Saccharomyces pastorianus
gattctgtttcaattgcggattcga

SEQ ID NO: 179168 - DNA, 25 bp, Saccharomyces pastorianus
gtgcacttgcgagatacgtcatcat

SEQ ID NO: 179169 - DNA, 25 bp, Saccharomyces pastorianus
gactgtaaatccatcgtgcacttgc

SEQ ID NO: 179170 - DNA, 25 bp, Saccharomyces pastorianus
aatcgtaactataaatggtgcccgt

SEQ ID NO: 179171 - DNA, 25 bp, Saccharomyces pastorianus
aagttcattccccagcagattgtaa

SEQ ID NO: 179172 - DNA, 25 bp, Saccharomyces pastorianus
gtttgcattattcacctttcgttaa

SEQ ID NO: 179173 - DNA, 25 bp, Saccharomyces pastorianus
gcaccaatcctgctgggactagata

SEQ ID NO: 179174 - DNA, 25 bp, Saccharomyces pastorianus
cgcttatgcaagacgttactgagaa

SEQ ID NO: 179175 - DNA, 25 bp, Saccharomyces pastorianus
agtcgaaattatgccacgcttatgc

SEQ ID NO: 179176 - DNA, 25 bp, Saccharomyces pastorianus
tctagagccccttcaagtcgaaatt

SEQ ID NO: 179177 - DNA, 25 bp, Saccharomyces pastorianus
ctcgttgacgaggatggcaccaatc

SEQ ID NO: 179178 - DNA, 25 bp, Saccharomyces pastorianus
atggcgagaaatttcctctagagcc

SEQ ID NO: 179179 - DNA, 25 bp, Saccharomyces pastorianus
atatgtgctgctgccactaattctt

SEQ ID NO: 179180 - DNA, 25 bp, Saccharomyces pastorianus
gcagcgcttccttcagatggaacaa

SEQ ID NO: 179181 - DNA, 25 bp, Saccharomyces pastorianus
tacaaccggaagtcttacactctaa

SEQ ID NO: 179182 - DNA, 25 bp, Saccharomyces pastorianus
gttatcaccgatgcaagaacctcgt

SEQ ID NO: 179183 - DNA, 25 bp, Saccharomyces pastorianus
gaacggcttgttctctgtcgatggc

SEQ ID NO: 179184 - DNA, 25 bp, Saccharomyces pastorianus
ttccctcttgcgttttagttcctct

SEQ ID NO: 179185 - DNA, 25 bp, Saccharomyces pastorianus
tctagccttttctgttctctaatac

SEQ ID NO: 179186 - DNA, 25 bp, Saccharomyces pastorianus
agcgcatcctctgcaattaatcttt

SEQ ID NO: 179187 - DNA, 25 bp, Saccharomyces pastorianus
tagttcctctttctgtttccgttgt

SEQ ID NO: 179188 - DNA, 25 bp, Saccharomyces pastorianus
attaatctttgtctctcttcttctt

SEQ ID NO: 179189 - DNA, 25 bp, Saccharomyces pastorianus
gtttaatttctgttttcttagcgca

SEQ ID NO: 179190 - DNA, 25 bp, Saccharomyces pastorianus
atttctgttttcttagcgcatcctc

SEQ ID NO: 179191 - DNA, 25 bp, Saccharomyces pastorianus
tctctaatacgtttcctttcttctt

SEQ ID NO: 179192 - DNA, 25 bp, Saccharomyces pastorianus
gtagcttttcttgttctagcctttt

SEQ ID NO: 179193 - DNA, 25 bp, Saccharomyces pastorianus
tgctcttccaatctacgctttctct

SEQ ID NO: 179194 - DNA, 25 bp, Saccharomyces pastorianus
ttctttttctttctgtagcttttct

SEQ ID NO: 179195 - DNA, 25 bp, Saccharomyces pastorianus
tcctattttggtggttccgcatgga

SEQ ID NO: 179196 - DNA, 25 bp, Saccharomyces pastorianus
tggtggttccgcatggaccttcgat

SEQ ID NO: 179197 - DNA, 25 bp, Saccharomyces pastorianus
ctattttggtggttccgcatggacc

SEQ ID NO: 179198 - DNA, 25 bp, Saccharomyces pastorianus
atatggtacgaatgaagactgcttt

SEQ ID NO: 179199 - DNA, 25 bp, Saccharomyces pastorianus
ctggccaacatatggtacgaatgaa

SEQ ID NO: 179200 - DNA, 25 bp, Saccharomyces pastorianus
cctattttggtggttccgcatggac

SEQ ID NO: 179201 - DNA, 25 bp, Saccharomyces pastorianus
tattttggtggttccgcatggacct

SEQ ID NO: 179202 - DNA, 25 bp, Saccharomyces pastorianus
ttggtggttccgcatggaccttcga

SEQ ID NO: 179203 - DNA, 25 bp, Saccharomyces pastorianus
atggtacgaatgaagactgctttgc

SEQ ID NO: 179204 - DNA, 25 bp, Saccharomyces pastorianus
attttggtggttccgcatggacctt

SEQ ID NO: 179205 - DNA, 25 bp, Saccharomyces pastorianus
ggccaacatatggtacgaatgaaga

SEQ ID NO: 179206 - DNA, 25 bp, Saccharomyces pastorianus
ttgggttatcaaacttcgcaacgga

SEQ ID NO: 179207 - DNA, 25 bp, Saccharomyces pastorianus
ttcatacaaaggctagcggattttc

SEQ ID NO: 179208 - DNA, 25 bp, Saccharomyces pastorianus
ccagaccctgaaactcctattgaag

SEQ ID NO: 179209 - DNA, 25 bp, Saccharomyces pastorianus
aacggaggacgtgaagcgcatccac

SEQ ID NO: 179210 - DNA, 25 bp, Saccharomyces pastorianus
gcgaattccgggttccaagtagatt

SEQ ID NO: 179211 - DNA, 25 bp, Saccharomyces pastorianus
gcggattttcagctggatgtttaac

SEQ ID NO: 179212 - DNA, 25 bp, Saccharomyces pastorianus
tgaagagtcgttgagcctgctaggc

SEQ ID NO: 179213 - DNA, 25 bp, Saccharomyces pastorianus
tctcggcgcaataaactctctgtat

SEQ ID NO: 179214 - DNA, 25 bp, Saccharomyces pastorianus
gcctgctaggcgttccaaatgttga

SEQ ID NO: 179215 - DNA, 25 bp, Saccharomyces pastorianus
aaacatattttttgcactcgccaga

SEQ ID NO: 179216 - DNA, 25 bp, Saccharomyces pastorianus
gcgaaaaaatccttggcgaattccg

SEQ ID NO: 179217 - DNA, 25 bp, Saccharomyces pastorianus
gttatcgtcctacgttcttgagaca

SEQ ID NO: 179218 - DNA, 25 bp, Saccharomyces pastorianus
gtttacgctttccaaccagttatcg

SEQ ID NO: 179219 - DNA, 25 bp, Saccharomyces pastorianus
gttgcactgtcttgtctatacttac

SEQ ID NO: 179220 - DNA, 25 bp, Saccharomyces pastorianus
tttcagcgcctaaaagtcgtcgtac

SEQ ID NO: 179221 - DNA, 25 bp, Saccharomyces pastorianus
ttaaatcagaccacctttttcagcg

SEQ ID NO: 179222 - DNA, 25 bp, Saccharomyces pastorianus
gtaccttttacatcactgcttatca

SEQ ID NO: 179223 - DNA, 25 bp, Saccharomyces pastorianus
aaagatagtcgcttttgcgcaatat

SEQ ID NO: 179224 - DNA, 25 bp, Saccharomyces pastorianus
acaattgactccgtgtttacgcttt

SEQ ID NO: 179225 - DNA, 25 bp, Saccharomyces pastorianus
agtcagcttccttgtgtacctttta

SEQ ID NO: 179226 - DNA, 25 bp, Saccharomyces pastorianus
gcacaccatttcctactggttacaa

SEQ ID NO: 179227 - DNA, 25 bp, Saccharomyces pastorianus
aacatattttccacagtcagcttcc

SEQ ID NO: 179228 - DNA, 25 bp, Saccharomyces pastorianus
gagtacaagtggaccaaaatgcaga

SEQ ID NO: 179229 - DNA, 25 bp, Saccharomyces pastorianus
gtacaagtggaccaaaatgcagacg

SEQ ID NO: 179230 - DNA, 25 bp, Saccharomyces pastorianus
aaagtcaagagtacaagtggaccaa

SEQ ID NO: 179231 - DNA, 25 bp, Saccharomyces pastorianus
tcaagagtacaagtggaccaaaatg

SEQ ID NO: 179232 - DNA, 25 bp, Saccharomyces pastorianus
aagtcaagagtacaagtggaccaaa

SEQ ID NO: 179233 - DNA, 25 bp, Saccharomyces pastorianus
acaagtggaccaaaatgcagacgca

SEQ ID NO: 179234 - DNA, 25 bp, Saccharomyces pastorianus
caagcttatgatttaaagtcaagag

SEQ ID NO: 179235 - DNA, 25 bp, Saccharomyces pastorianus
caagtggaccaaaatgcagacgcat

SEQ ID NO: 179236 - DNA, 25 bp, Saccharomyces pastorianus
aagtggaccaaaatgcagacgcatc

SEQ ID NO: 179237 - DNA, 25 bp, Saccharomyces pastorianus
agtggaccaaaatgcagacgcatca

SEQ ID NO: 179238 - DNA, 25 bp, Saccharomyces pastorianus
aagagtacaagtggaccaaaatgca

SEQ ID NO: 179239 - DNA, 25 bp, Saccharomyces pastorianus
aatactgtcttggtttggcaggcac

SEQ ID NO: 179240 - DNA, 25 bp, Saccharomyces pastorianus
gggtcatttttcagctgtttcaagg

SEQ ID NO: 179241 - DNA, 25 bp, Saccharomyces pastorianus
gtattgttgcagaaatcccatccgc

SEQ ID NO: 179242 - DNA, 25 bp, Saccharomyces pastorianus
aatgctattctaacgccctatatgc

SEQ ID NO: 179243 - DNA, 25 bp, Saccharomyces pastorianus
ccttcactttctcgctaattcaata

SEQ ID NO: 179244 - DNA, 25 bp, Saccharomyces pastorianus
gtatcggagctgtcgtttactgtat

SEQ ID NO: 179245 - DNA, 25 bp, Saccharomyces pastorianus
gctacaatctaatggccgtcttcaa

SEQ ID NO: 179246 - DNA, 25 bp, Saccharomyces pastorianus
caagaccattgtgctggcccgtatt

SEQ ID NO: 179247 - DNA, 25 bp, Saccharomyces pastorianus
gcacgcttggttcctgggtaatatc

SEQ ID NO: 179248 - DNA, 25 bp, Saccharomyces pastorianus
atctttcttctataacgcgggtatc

SEQ ID NO: 179249 - DNA, 25 bp, Saccharomyces pastorianus
ttgcgtgtttgacttgggttgctca

SEQ ID NO: 179250 - DNA, 25 bp, Saccharomyces pastorianus
gatctaggaatcctcaaaatggaat

SEQ ID NO: 179251 - DNA, 25 bp, Saccharomyces pastorianus
tctacaagaagttctcctcgaggat

SEQ ID NO: 179252 - DNA, 25 bp, Saccharomyces pastorianus
ctcgaggatctaggaatcctcaaaa

SEQ ID NO: 179253 - DNA, 25 bp, Saccharomyces pastorianus
cgaggatctaggaatcctcaaaatg

SEQ ID NO: 179254 - DNA, 25 bp, Saccharomyces pastorianus
ctacaagaagttctcctcgaggatc

SEQ ID NO: 179255 - DNA, 25 bp, Saccharomyces pastorianus
tcgaggatctaggaatcctcaaaat

SEQ ID NO: 179256 - DNA, 25 bp, Saccharomyces pastorianus
gaggatctaggaatcctcaaaatgg

SEQ ID NO: 179257 - DNA, 25 bp, Saccharomyces pastorianus
tctctacaagaagttctcctcgagg

SEQ ID NO: 179258 - DNA, 25 bp, Saccharomyces pastorianus
ctctacaagaagttctcctcgagga

SEQ ID NO: 179259 - DNA, 25 bp, Saccharomyces pastorianus
ggatctaggaatcctcaaaatggaa

SEQ ID NO: 179260 - DNA, 25 bp, Saccharomyces pastorianus
aggatctaggaatcctcaaaatgga

SEQ ID NO: 179261 - DNA, 25 bp, Saccharomyces pastorianus
atcaaggagagaccttgtctacggc

SEQ ID NO: 179262 - DNA, 25 bp, Saccharomyces pastorianus
tagctagttcattgaccattcaaag

SEQ ID NO: 179263 - DNA, 25 bp, Saccharomyces pastorianus
gggtgcttttctgttcgcacgaaag

SEQ ID NO: 179264 - DNA, 25 bp, Saccharomyces pastorianus
aattgagggtcttcaaatcgtggaa

SEQ ID NO: 179265 - DNA, 25 bp, Saccharomyces pastorianus
gaagtacaattccttccggctattc

SEQ ID NO: 179266 - DNA, 25 bp, Saccharomyces pastorianus
agctggagatactttcctgggcggt

SEQ ID NO: 179267 - DNA, 25 bp, Saccharomyces pastorianus
aatgtttcggttgttgatactacag

SEQ ID NO: 179268 - DNA, 25 bp, Saccharomyces pastorianus
gttcgcacgaaagccctgaagtaca

SEQ ID NO: 179269 - DNA, 25 bp, Saccharomyces pastorianus
gggcggtttggttactcaattgtat

SEQ ID NO: 179270 - DNA, 25 bp, Saccharomyces pastorianus
gaccttttggtcgttaatgaaattg

SEQ ID NO: 179271 - DNA, 25 bp, Saccharomyces pastorianus
ccttccggctattcaaaatgtttcg

SEQ ID NO: 179272 - DNA, 25 bp, Saccharomyces pastorianus
atacaagtggttcaggcgcccagta

SEQ ID NO: 179273 - DNA, 25 bp, Saccharomyces pastorianus
attggatcctccacttgttgaaccg

SEQ ID NO: 179274 - DNA, 25 bp, Saccharomyces pastorianus
atacgatgccgaacgctacatttca

SEQ ID NO: 179275 - DNA, 25 bp, Saccharomyces pastorianus
atattctaagcttgaactctcccac

SEQ ID NO: 179276 - DNA, 25 bp, Saccharomyces pastorianus
gcgcccagtagccatttgaatttga

SEQ ID NO: 179277 - DNA, 25 bp, Saccharomyces pastorianus
ttatgcaaaatgttccgtgtccaat

SEQ ID NO: 179278 - DNA, 25 bp, Saccharomyces pastorianus
tgaatttccattgtatccgaactac

SEQ ID NO: 179279 - DNA, 25 bp, Saccharomyces pastorianus
gaacttcatcagctttcggcaacac

SEQ ID NO: 179280 - DNA, 25 bp, Saccharomyces pastorianus
atattggttcaagatccgcgccata

SEQ ID NO: 179281 - DNA, 25 bp, Saccharomyces pastorianus
gctagcttcagtaattccgccaaag

SEQ ID NO: 179282 - DNA, 25 bp, Saccharomyces pastorianus
gcgccataggcctaacgtttatcaa

SEQ ID NO: 179283 - DNA, 25 bp, Saccharomyces pastorianus
gctcctttgaattcagggacttgca

SEQ ID NO: 179284 - DNA, 25 bp, Saccharomyces pastorianus
gaaactctttggcagctcctttgaa

SEQ ID NO: 179285 - DNA, 25 bp, Saccharomyces pastorianus
ttggcagctcctttgaattcaggga

SEQ ID NO: 179286 - DNA, 25 bp, Saccharomyces pastorianus
ggacttgcatcagttgcgcttatgt

SEQ ID NO: 179287 - DNA, 25 bp, Saccharomyces pastorianus
tttgaattcagggacttgcatcagt

SEQ ID NO: 179288 - DNA, 25 bp, Saccharomyces pastorianus
tcagggacttgcatcagttgcgctt

SEQ ID NO: 179289 - DNA, 25 bp, Saccharomyces pastorianus
aattcagggacttgcatcagttgcg

SEQ ID NO: 179290 - DNA, 25 bp, Saccharomyces pastorianus
gcagctcctttgaattcagggactt

SEQ ID NO: 179291 - DNA, 25 bp, Saccharomyces pastorianus
agggacttgcatcagttgcgcttat

SEQ ID NO: 179292 - DNA, 25 bp, Saccharomyces pastorianus
tctttggcagctcctttgaattcag

SEQ ID NO: 179293 - DNA, 25 bp, Saccharomyces pastorianus
aaactctttggcagctcctttgaat

SEQ ID NO: 179294 - DNA, 25 bp, Saccharomyces pastorianus
gataagggatattggcctactccat

SEQ ID NO: 179295 - DNA, 25 bp, Saccharomyces pastorianus
attcggatccatcaaccggcgatgg

SEQ ID NO: 179296 - DNA, 25 bp, Saccharomyces pastorianus
tacggatgcgagagacgctccgaat

SEQ ID NO: 179297 - DNA, 25 bp, Saccharomyces pastorianus
gacatgttcaagtctcacttttatt

SEQ ID NO: 179298 - DNA, 25 bp, Saccharomyces pastorianus
gctccgaatgatggcgacccaattt

SEQ ID NO: 179299 - DNA, 25 bp, Saccharomyces pastorianus
cctactccatactacttttactgtg

SEQ ID NO: 179300 - DNA, 25 bp, Saccharomyces pastorianus
gggaatatcactcttcctgaagaca

SEQ ID NO: 179301 - DNA, 25 bp, Saccharomyces pastorianus
gaaattcaaaaacaggccgtacgag

SEQ ID NO: 179302 - DNA, 25 bp, Saccharomyces pastorianus
ggtaacctcatcgtattcatatttt

SEQ ID NO: 179303 - DNA, 25 bp, Saccharomyces pastorianus
gaatcccgatgcacattcggatcca

SEQ ID NO: 179304 - DNA, 25 bp, Saccharomyces pastorianus
gtaatttcaatttcatcggttctaa

SEQ ID NO: 179305 - DNA, 25 bp, Saccharomyces pastorianus
attattcttcactctgttttacatg

SEQ ID NO: 179306 - DNA, 25 bp, Saccharomyces pastorianus
tattcttcactctgttttacatgtt

SEQ ID NO: 179307 - DNA, 25 bp, Saccharomyces pastorianus
cgattattcttcactctgttttaca

SEQ ID NO: 179308 - DNA, 25 bp, Saccharomyces pastorianus
attcttcactctgttttacatgttt

SEQ ID NO: 179309 - DNA, 25 bp, Saccharomyces pastorianus
gattattcttcactctgttttacat

SEQ ID NO: 179310 - DNA, 25 bp, Saccharomyces pastorianus
ctctgttttacatgtttcattatcc

SEQ ID NO: 179311 - DNA, 25 bp, Saccharomyces pastorianus
tcttcactctgttttacatgtttca

SEQ ID NO: 179312 - DNA, 25 bp, Saccharomyces pastorianus
ttcactctgttttacatgtttcatt

SEQ ID NO: 179313 - DNA, 25 bp, Saccharomyces pastorianus
acgattattcttcactctgttttac

SEQ ID NO: 179314 - DNA, 25 bp, Saccharomyces pastorianus
ttattcttcactctgttttacatgt

SEQ ID NO: 179315 - DNA, 25 bp, Saccharomyces pastorianus
ttcttcactctgttttacatgtttc

SEQ ID NO: 179316 - DNA, 25 bp, Saccharomyces pastorianus
tagagactctcagactaatcccttc

SEQ ID NO: 179317 - DNA, 25 bp, Saccharomyces pastorianus
ggaagctaacccaactaatccattc

SEQ ID NO: 179318 - DNA, 25 bp, Saccharomyces pastorianus
gtggaatctacctttggtaccgcta

SEQ ID NO: 179319 - DNA, 25 bp, Saccharomyces pastorianus
gctggccttagggtgttattcacag

SEQ ID NO: 179320 - DNA, 25 bp, Saccharomyces pastorianus
gtatcaaatttacggcattccatgc

SEQ ID NO: 179321 - DNA, 25 bp, Saccharomyces pastorianus
tgttctactgcctgtttttgcttta

SEQ ID NO: 179322 - DNA, 25 bp, Saccharomyces pastorianus
gaactcggtggtggacaagtcccaa

SEQ ID NO: 179323 - DNA, 25 bp, Saccharomyces pastorianus
gactatcattctactgttgacgtca

SEQ ID NO: 179324 - DNA, 25 bp, Saccharomyces pastorianus
gagtactggtctcaacatgctgatg

SEQ ID NO: 179325 - DNA, 25 bp, Saccharomyces pastorianus
caggccatgtattgggtgcagcgat

SEQ ID NO: 179326 - DNA, 25 bp, Saccharomyces pastorianus
tgagaggaggccgtgttctactgcc

SEQ ID NO: 179327 - DNA, 25 bp, Saccharomyces pastorianus
ggacaggactccgacaagtgcaagg

SEQ ID NO: 179328 - DNA, 25 bp, Saccharomyces pastorianus
aaggaggagcgtgacacctgcatct

SEQ ID NO: 179329 - DNA, 25 bp, Saccharomyces pastorianus
catgctgtgtttgcaagcccgagaa

SEQ ID NO: 179330 - DNA, 25 bp, Saccharomyces pastorianus
tcgacaagtacaaggagtgcatgaa

SEQ ID NO: 179331 - DNA, 25 bp, Saccharomyces pastorianus
gacaagtgcaaggagttcatcgaca

SEQ ID NO: 179332 - DNA, 25 bp, Saccharomyces pastorianus
ttgttcaacggacaggactccgaca

SEQ ID NO: 179333 - DNA, 25 bp, Saccharomyces pastorianus
ctgtgtttgcaagcccgagaaggag

SEQ ID NO: 179334 - DNA, 25 bp, Saccharomyces pastorianus
gagttcatcgacaagtacaaggagt

SEQ ID NO: 179335 - DNA, 25 bp, Saccharomyces pastorianus
tgcatcttgttcaacggacaggact

SEQ ID NO: 179336 - DNA, 25 bp, Saccharomyces pastorianus
gagcgtgacacctgcatcttgttca

SEQ ID NO: 179337 - DNA, 25 bp, Saccharomyces pastorianus
gtgcaaggagttcatcgacaagtac

SEQ ID NO: 179338 - DNA, 25 bp, Saccharomyces pastorianus
cagattaaagccagccatctccagt

SEQ ID NO: 179339 - DNA, 25 bp, Saccharomyces pastorianus
gccccagaccaagtgactagaatga

SEQ ID NO: 179340 - DNA, 25 bp, Saccharomyces pastorianus
ttgccccagaccaagtgactagaat

SEQ ID NO: 179341 - DNA, 25 bp, Saccharomyces pastorianus
tgccccagaccaagtgactagaatg

SEQ ID NO: 179342 - DNA, 25 bp, Saccharomyces pastorianus
tattgccccagaccaagtgactaga

SEQ ID NO: 179343 - DNA, 25 bp, Saccharomyces pastorianus
attgccccagaccaagtgactagaa

SEQ ID NO: 179344 - DNA, 25 bp, Saccharomyces pastorianus
gtattgccccagaccaagtgactag

SEQ ID NO: 179345 - DNA, 25 bp, Saccharomyces pastorianus
ggtattgccccagaccaagtgacta

SEQ ID NO: 179346 - DNA, 25 bp, Saccharomyces pastorianus
tggtattgccccagaccaagtgact

SEQ ID NO: 179347 - DNA, 25 bp, Saccharomyces pastorianus
cccagaccaagtgactagaatgatc

SEQ ID NO: 179348 - DNA, 25 bp, Saccharomyces pastorianus
agtgactagaatgatcaccggtgtc

SEQ ID NO: 179349 - DNA, 25 bp, Saccharomyces pastorianus
ttacctgatttcgaccagaccaatc

SEQ ID NO: 179350 - DNA, 25 bp, Saccharomyces pastorianus
aattctgttatcttaagaactccac

SEQ ID NO: 179351 - DNA, 25 bp, Saccharomyces pastorianus
tgccagacagactataagatcacgt

SEQ ID NO: 179352 - DNA, 25 bp, Saccharomyces pastorianus
agatcacgtcagattacattcaaga

SEQ ID NO: 179353 - DNA, 25 bp, Saccharomyces pastorianus
gaactccacaatgccagacagacta

SEQ ID NO: 179354 - DNA, 25 bp, Saccharomyces pastorianus
ttaagaactccacaatgccagacag

SEQ ID NO: 179355 - DNA, 25 bp, Saccharomyces pastorianus
atgaggcctcttttgaaattacaag

SEQ ID NO: 179356 - DNA, 25 bp, Saccharomyces pastorianus
tcgaccagaccaatccggatgcttg

SEQ ID NO: 179357 - DNA, 25 bp, Saccharomyces pastorianus
gatttcgaccagaccaatccggatg

SEQ ID NO: 179358 - DNA, 25 bp, Saccharomyces pastorianus
gattacattcaagatcttttacctg

SEQ ID NO: 179359 - DNA, 25 bp, Saccharomyces pastorianus
aagatcttttacctgatttcgacca

SEQ ID NO: 179360 - DNA, 25 bp, Saccharomyces pastorianus
aattaccaccgaacaaggaaggctg

SEQ ID NO: 179361 - DNA, 25 bp, Saccharomyces pastorianus
attatctagacaatacagttgggcg

SEQ ID NO: 179362 - DNA, 25 bp, Saccharomyces pastorianus
tatctagacaatacagttgggcggc

SEQ ID NO: 179363 - DNA, 25 bp, Saccharomyces pastorianus
tctagacaatacagttgggcggcaa

SEQ ID NO: 179364 - DNA, 25 bp, Saccharomyces pastorianus
ctagacaatacagttgggcggcaag

SEQ ID NO: 179365 - DNA, 25 bp, Saccharomyces pastorianus
taccaccgaacaaggaaggctgtat

SEQ ID NO: 179366 - DNA, 25 bp, Saccharomyces pastorianus
ggtgaattaccaccgaacaaggaag

SEQ ID NO: 179367 - DNA, 25 bp, Saccharomyces pastorianus
gaattaccaccgaacaaggaaggct

SEQ ID NO: 179368 - DNA, 25 bp, Saccharomyces pastorianus
ttatctagacaatacagttgggcgg

SEQ ID NO: 179369 - DNA, 25 bp, Saccharomyces pastorianus
tagacaatacagttgggcggcaagg

SEQ ID NO: 179370 - DNA, 25 bp, Saccharomyces pastorianus
accaccgaacaaggaaggctgtata

SEQ ID NO: 179371 - DNA, 25 bp, Saccharomyces pastorianus
tggtttctgttgtggttgctgctgc

SEQ ID NO: 179372 - DNA, 25 bp, Saccharomyces pastorianus
tgctgttgctccatctcttttaaca

SEQ ID NO: 179373 - DNA, 25 bp, Saccharomyces pastorianus
aacagcagctgtctcttcttagact

SEQ ID NO: 179374 - DNA, 25 bp, Saccharomyces pastorianus
ctgttgttgtggttgctgtttctgt

SEQ ID NO: 179375 - DNA, 25 bp, Saccharomyces pastorianus
ctttcttattggcttgtacttgtat

SEQ ID NO: 179376 - DNA, 25 bp, Saccharomyces pastorianus
gttgctccatctcttttaacagcag

SEQ ID NO: 179377 - DNA, 25 bp, Saccharomyces pastorianus
agctgtctcttcttagactttctta

SEQ ID NO: 179378 - DNA, 25 bp, Saccharomyces pastorianus
ctccatctcttttaacagcagctgt

SEQ ID NO: 179379 - DNA, 25 bp, Saccharomyces pastorianus
gctgtttctgttgtggtttctgttg

SEQ ID NO: 179380 - DNA, 25 bp, Saccharomyces pastorianus
agactttcttattggcttgtacttg

SEQ ID NO: 179381 - DNA, 25 bp, Saccharomyces pastorianus
ggttgctgtttctgttgtggtttct

SEQ ID NO: 179382 - DNA, 25 bp, Saccharomyces pastorianus
gtaatgagccttgtaatatggaaca

SEQ ID NO: 179383 - DNA, 25 bp, Saccharomyces pastorianus
acgtggatctggctactttgataga

SEQ ID NO: 179384 - DNA, 25 bp, Saccharomyces pastorianus
taagctcgctgacaagttgaatgca

SEQ ID NO: 179385 - DNA, 25 bp, Saccharomyces pastorianus
aagggccgtaatgagccttgtaata

SEQ ID NO: 179386 - DNA, 25 bp, Saccharomyces pastorianus
gtagcaattgtcgtatcggaagtca

SEQ ID NO: 179387 - DNA, 25 bp, Saccharomyces pastorianus
gattttgaatccctgcatcagtccg

SEQ ID NO: 179388 - DNA, 25 bp, Saccharomyces pastorianus
tccctgcatcagtccgttaagaaaa

SEQ ID NO: 179389 - DNA, 25 bp, Saccharomyces pastorianus
tctggctactttgatagataccacg

SEQ ID NO: 179390 - DNA, 25 bp, Saccharomyces pastorianus
gttaagaaaaataagctcgctgaca

SEQ ID NO: 179391 - DNA, 25 bp, Saccharomyces pastorianus
aagtcaaggacgtggatctggctac

SEQ ID NO: 179392 - DNA, 25 bp, Saccharomyces pastorianus
gaactttacatggtcaagggccgta

SEQ ID NO: 179393 - DNA, 25 bp, Saccharomyces pastorianus
aggcacggctgctttcaaagatcct

SEQ ID NO: 179394 - DNA, 25 bp, Saccharomyces pastorianus
gcggcccagagtgcactcaaacata

SEQ ID NO: 179395 - DNA, 25 bp, Saccharomyces pastorianus
ggatctgcggttattcagtgtcctg

SEQ ID NO: 179396 - DNA, 25 bp, Saccharomyces pastorianus
gcgcggcatgaaaccgttcatcgta

SEQ ID NO: 179397 - DNA, 25 bp, Saccharomyces pastorianus
accacgttgagattgcgcagcgcgg

SEQ ID NO: 179398 - DNA, 25 bp, Saccharomyces pastorianus
aaattcgatatgcaggcggcccaga

SEQ ID NO: 179399 - DNA, 25 bp, Saccharomyces pastorianus
taccttcacgttttactatcatggg

SEQ ID NO: 179400 - DNA, 25 bp, Saccharomyces pastorianus
ggctctcgggttactatcgttgaat

SEQ ID NO: 179401 - DNA, 25 bp, Saccharomyces pastorianus
cagtgtcctggtgttgcaatagata

SEQ ID NO: 179402 - DNA, 25 bp, Saccharomyces pastorianus
gcggctgtttcctgcaaaattcgat

SEQ ID NO: 179403 - DNA, 25 bp, Saccharomyces pastorianus
atatattgttgtggcgaccggatct

SEQ ID NO: 179404 - DNA, 25 bp, Saccharomyces pastorianus
cagacatcgcgcaacagcaacctca

SEQ ID NO: 179405 - DNA, 25 bp, Saccharomyces pastorianus
acaatcggatatcgcacaacagcaa

SEQ ID NO: 179406 - DNA, 25 bp, Saccharomyces pastorianus
agcaaccagacatcgcgcaacagca

SEQ ID NO: 179407 - DNA, 25 bp, Saccharomyces pastorianus
caaccagacatcgcgcaacagcaac

SEQ ID NO: 179408 - DNA, 25 bp, Saccharomyces pastorianus
gacaatcggatatcgcacaacagca

SEQ ID NO: 179409 - DNA, 25 bp, Saccharomyces pastorianus
atcggatatcgcacaacagcaacaa

SEQ ID NO: 179410 - DNA, 25 bp, Saccharomyces pastorianus
acagcagcaaccagacatcgcgcaa

SEQ ID NO: 179411 - DNA, 25 bp, Saccharomyces pastorianus
agcagcaaccagacatcgcgcaaca

SEQ ID NO: 179412 - DNA, 25 bp, Saccharomyces pastorianus
aatcggatatcgcacaacagcaaca

SEQ ID NO: 179413 - DNA, 25 bp, Saccharomyces pastorianus
gcagcaaccagacatcgcgcaacag

SEQ ID NO: 179414 - DNA, 25 bp, Saccharomyces pastorianus
gcaaccagacatcgcgcaacagcaa

SEQ ID NO: 179415 - DNA, 25 bp, Saccharomyces pastorianus
ttggccttctggagacaaagttaaa

SEQ ID NO: 179416 - DNA, 25 bp, Saccharomyces pastorianus
atcgtcttcgtcactttcactttca

SEQ ID NO: 179417 - DNA, 25 bp, Saccharomyces pastorianus
ttggaactcgtcgtcttcgtcatca

SEQ ID NO: 179418 - DNA, 25 bp, Saccharomyces pastorianus
acttcttcttctggagcaatggtta

SEQ ID NO: 179419 - DNA, 25 bp, Saccharomyces pastorianus
tcttctggagcaatggttaggtcca

SEQ ID NO: 179420 - DNA, 25 bp, Saccharomyces pastorianus
acagattcttggaactcgtcgtctt

SEQ ID NO: 179421 - DNA, 25 bp, Saccharomyces pastorianus
gttaggtccaatgattgttggcatt

SEQ ID NO: 179422 - DNA, 25 bp, Saccharomyces pastorianus
tcactttcactctcgctttcaactt

SEQ ID NO: 179423 - DNA, 25 bp, Saccharomyces pastorianus
ttggcattggccttctggagacaaa

SEQ ID NO: 179424 - DNA, 25 bp, Saccharomyces pastorianus
ctttcttgcccttgttcttcttctt

SEQ ID NO: 179425 - DNA, 25 bp, Saccharomyces pastorianus
tttcaactttcttgcccttgttctt

SEQ ID NO: 179426 - DNA, 25 bp, Saccharomyces pastorianus
gcaatgctctctcctcgttaaaaaa

SEQ ID NO: 179427 - DNA, 25 bp, Saccharomyces pastorianus
gccctccaccagttggcacaaatag

SEQ ID NO: 179428 - DNA, 25 bp, Saccharomyces pastorianus
acagtgatcatggtgatgctcctaa

SEQ ID NO: 179429 - DNA, 25 bp, Saccharomyces pastorianus
aatattaagttcctcgtcttccaca

SEQ ID NO: 179430 - DNA, 25 bp, Saccharomyces pastorianus
gctttacagagccagattcggtctt

SEQ ID NO: 179431 - DNA, 25 bp, Saccharomyces pastorianus
tcgtcttccacaattgctagcaatg

SEQ ID NO: 179432 - DNA, 25 bp, Saccharomyces pastorianus
gtaccgaatgtgtattcactcaaca

SEQ ID NO: 179433 - DNA, 25 bp, Saccharomyces pastorianus
actgtatcaagtttcgtaccgaatg

SEQ ID NO: 179434 - DNA, 25 bp, Saccharomyces pastorianus
aatgagtctgatgcgttcaccaaga

SEQ ID NO: 179435 - DNA, 25 bp, Saccharomyces pastorianus
aagaaaatgccttccgagagccctc

SEQ ID NO: 179436 - DNA, 25 bp, Saccharomyces pastorianus
gcactaccatcatctgaaagcaacg

SEQ ID NO: 179437 - DNA, 25 bp, Saccharomyces pastorianus
atgaacacgaacacgaacacgaaca

SEQ ID NO: 179438 - DNA, 25 bp, Saccharomyces pastorianus
acatgaacacgaacacgaacacgaa

SEQ ID NO: 179439 - DNA, 25 bp, Saccharomyces pastorianus
catgaacacgaacacgaacacgaac

SEQ ID NO: 179440 - DNA, 25 bp, Saccharomyces pastorianus
gaacacgaacacgaacacgaacacg

SEQ ID NO: 179441 - DNA, 25 bp, Saccharomyces pastorianus
acacgaacacgaacacgaacacgaa

SEQ ID NO: 179442 - DNA, 25 bp, Saccharomyces pastorianus
aacatgaacacgaacacgaacacga

SEQ ID NO: 179443 - DNA, 25 bp, Saccharomyces pastorianus
tgaacacgaacacgaacacgaacac

SEQ ID NO: 179444 - DNA, 25 bp, Saccharomyces pastorianus
acgaacacgaacacgaacacgaaca

SEQ ID NO: 179445 - DNA, 25 bp, Saccharomyces pastorianus
aacacgaacacgaacacgaacacga

SEQ ID NO: 179446 - DNA, 25 bp, Saccharomyces pastorianus
cacgaacacgaacacgaacacgaac

SEQ ID NO: 179447 - DNA, 25 bp, Saccharomyces pastorianus
cgaacacgaacacgaacacgaacac

SEQ ID NO: 179448 - DNA, 25 bp, Saccharomyces pastorianus
agtagctggtactgatttccttaaa

SEQ ID NO: 179449 - DNA, 25 bp, Saccharomyces pastorianus
cagtgctctaacgatacctatgtta

SEQ ID NO: 179450 - DNA, 25 bp, Saccharomyces pastorianus
tgggaagttccagtgctctaacgat

SEQ ID NO: 179451 - DNA, 25 bp, Saccharomyces pastorianus
taaagtctgtaacgttagcagcgtc

SEQ ID NO: 179452 - DNA, 25 bp, Saccharomyces pastorianus
aacggcttctacgactttgctgaaa

SEQ ID NO: 179453 - DNA, 25 bp, Saccharomyces pastorianus
ttccagtgctctaacgatacctatg

SEQ ID NO: 179454 - DNA, 25 bp, Saccharomyces pastorianus
ggtactgatttccttaaagtctgta

SEQ ID NO: 179455 - DNA, 25 bp, Saccharomyces pastorianus
gaagttccagtgctctaacgatacc

SEQ ID NO: 179456 - DNA, 25 bp, Saccharomyces pastorianus
ttttcttgtgaaataaacggcttct

SEQ ID NO: 179457 - DNA, 25 bp, Saccharomyces pastorianus
cggcttctacgactttgctgaaaag

SEQ ID NO: 179458 - DNA, 25 bp, Saccharomyces pastorianus
ataaacggcttctacgactttgctg

SEQ ID NO: 179459 - DNA, 25 bp, Saccharomyces pastorianus
gttctctccatcacacaatagcaat

SEQ ID NO: 179460 - DNA, 25 bp, Saccharomyces pastorianus
tagcaatgcaagaacgtcctctaat

SEQ ID NO: 179461 - DNA, 25 bp, Saccharomyces pastorianus
aaaggccccaaatagcgtcatttct

SEQ ID NO: 179462 - DNA, 25 bp, Saccharomyces pastorianus
taattggacgagtgacctcgctagt

SEQ ID NO: 179463 - DNA, 25 bp, Saccharomyces pastorianus
aatagaggtcctccttctatcattt

SEQ ID NO: 179464 - DNA, 25 bp, Saccharomyces pastorianus
agcctttcccatttcacaacaaata

SEQ ID NO: 179465 - DNA, 25 bp, Saccharomyces pastorianus
gaaaaggtgcttagcctttcccatt

SEQ ID NO: 179466 - DNA, 25 bp, Saccharomyces pastorianus
tagcccatctactacaagcaacgac

SEQ ID NO: 179467 - DNA, 25 bp, Saccharomyces pastorianus
ggatgacagccacaacataatcgat

SEQ ID NO: 179468 - DNA, 25 bp, Saccharomyces pastorianus
ggagctaacagcgtcaatacatata

SEQ ID NO: 179469 - DNA, 25 bp, Saccharomyces pastorianus
tttaaacccgtggaacatccgccag

SEQ ID NO: 179470 - DNA, 25 bp, Saccharomyces pastorianus
agggtattcgtacacagatgccaat

SEQ ID NO: 179471 - DNA, 25 bp, Saccharomyces pastorianus
aggtgctacacttttcaagactaga

SEQ ID NO: 179472 - DNA, 25 bp, Saccharomyces pastorianus
tcgtacacagatgccaatatcaaga

SEQ ID NO: 179473 - DNA, 25 bp, Saccharomyces pastorianus
gaaaataacatgtcagagtacttga

SEQ ID NO: 179474 - DNA, 25 bp, Saccharomyces pastorianus
caccgtggaaaagggtggcccacat

SEQ ID NO: 179475 - DNA, 25 bp, Saccharomyces pastorianus
tggtccaaacttgcatggtatcttt

SEQ ID NO: 179476 - DNA, 25 bp, Saccharomyces pastorianus
tcaagctgaagggtattcgtacaca

SEQ ID NO: 179477 - DNA, 25 bp, Saccharomyces pastorianus
gtggcccacataaggttggtccaaa

SEQ ID NO: 179478 - DNA, 25 bp, Saccharomyces pastorianus
tctgctaagaaaggtgctacacttt

SEQ ID NO: 179479 - DNA, 25 bp, Saccharomyces pastorianus
tatcaagaaaaacgtgttgtgggac

SEQ ID NO: 179480 - DNA, 25 bp, Saccharomyces pastorianus
gacactctggtcaagctgaagggta

SEQ ID NO: 179481 - DNA, 25 bp, Saccharomyces pastorianus
taatagttctaaaagctctcgcagt

SEQ ID NO: 179482 - DNA, 25 bp, Saccharomyces pastorianus
gctagaagaaaagttacaccctcca

SEQ ID NO: 179483 - DNA, 25 bp, Saccharomyces pastorianus
tgcagtttcgccacatcggacacta

SEQ ID NO: 179484 - DNA, 25 bp, Saccharomyces pastorianus
aaaattgcagtttcgccacatcgga

SEQ ID NO: 179485 - DNA, 25 bp, Saccharomyces pastorianus
gggaatctgttatctgtggaagcta

SEQ ID NO: 179486 - DNA, 25 bp, Saccharomyces pastorianus
gccacatcggacactacagagctca

SEQ ID NO: 179487 - DNA, 25 bp, Saccharomyces pastorianus
atctgttatctgtggaagctagaag

SEQ ID NO: 179488 - DNA, 25 bp, Saccharomyces pastorianus
tcggacactacagagctcaccaggg

SEQ ID NO: 179489 - DNA, 25 bp, Saccharomyces pastorianus
agttctaaaagctctcgcagtaggg

SEQ ID NO: 179490 - DNA, 25 bp, Saccharomyces pastorianus
acccgccaaaattgcagtttcgcca

SEQ ID NO: 179491 - DNA, 25 bp, Saccharomyces pastorianus
gtttcgccacatcggacactacaga

SEQ ID NO: 179492 - DNA, 25 bp, Saccharomyces pastorianus
gattttgagagacgaaggcctgttc

SEQ ID NO: 179493 - DNA, 25 bp, Saccharomyces pastorianus
gccgctggacgtgttgaagattaag

SEQ ID NO: 179494 - DNA, 25 bp, Saccharomyces pastorianus
agagacgaaggcctgttcaacttat

SEQ ID NO: 179495 - DNA, 25 bp, Saccharomyces pastorianus
gaaggcctgttcaacttatataggg

SEQ ID NO: 179496 - DNA, 25 bp, Saccharomyces pastorianus
gacgaaggcctgttcaacttatata

SEQ ID NO: 179497 - DNA, 25 bp, Saccharomyces pastorianus
cttttgccgctggacgtgttgaaga

SEQ ID NO: 179498 - DNA, 25 bp, Saccharomyces pastorianus
ttgccgctggacgtgttgaagatta

SEQ ID NO: 179499 - DNA, 25 bp, Saccharomyces pastorianus
attaagagacagaccaatcccgaat

SEQ ID NO: 179500 - DNA, 25 bp, Saccharomyces pastorianus
ctggacgtgttgaagattaagagac

SEQ ID NO: 179501 - DNA, 25 bp, Saccharomyces pastorianus
gtagaggtttcatcaagattttgag

SEQ ID NO: 179502 - DNA, 25 bp, Saccharomyces pastorianus
agagacagaccaatcccgaatcgtt

SEQ ID NO: 179503 - DNA, 25 bp, Saccharomyces pastorianus
aggtagtcagacgtgcttgccaagc

SEQ ID NO: 179504 - DNA, 25 bp, Saccharomyces pastorianus
ggctcttcattgcagaaaccagttc

SEQ ID NO: 179505 - DNA, 25 bp, Saccharomyces pastorianus
aggttatacgacacttattccgatg

SEQ ID NO: 179506 - DNA, 25 bp, Saccharomyces pastorianus
cgatgcctgatgattttgacgaaat

SEQ ID NO: 179507 - DNA, 25 bp, Saccharomyces pastorianus
aaactgttcccatttgcaagacgaa

SEQ ID NO: 179508 - DNA, 25 bp, Saccharomyces pastorianus
atcaagatacgaccgaggcttattt

SEQ ID NO: 179509 - DNA, 25 bp, Saccharomyces pastorianus
aaacgagttctcttcaggtagtcag

SEQ ID NO: 179510 - DNA, 25 bp, Saccharomyces pastorianus
gaaatcggttcatatactacaggag

SEQ ID NO: 179511 - DNA, 25 bp, Saccharomyces pastorianus
tatactactccgcttgatacagatt

SEQ ID NO: 179512 - DNA, 25 bp, Saccharomyces pastorianus
attttaggtcatgcaggctcttcat

SEQ ID NO: 179513 - DNA, 25 bp, Saccharomyces pastorianus
ttcaagcctttatttctaaccacga

SEQ ID NO: 179514 - DNA, 25 bp, Saccharomyces pastorianus
atggactgtcaaatggttcaactag

SEQ ID NO: 179515 - DNA, 25 bp, Saccharomyces pastorianus
ggaacggtctcgctcaataatactg

SEQ ID NO: 179516 - DNA, 25 bp, Saccharomyces pastorianus
ggcaaacggtgtgaactcctccatt

SEQ ID NO: 179517 - DNA, 25 bp, Saccharomyces pastorianus
gcgaatctagctaacggaaggccgt

SEQ ID NO: 179518 - DNA, 25 bp, Saccharomyces pastorianus
gatccactagcagatgtggcaccag

SEQ ID NO: 179519 - DNA, 25 bp, Saccharomyces pastorianus
attcctactgtaactggctcttcta

SEQ ID NO: 179520 - DNA, 25 bp, Saccharomyces pastorianus
ctactactgtatccgccattgaaag

SEQ ID NO: 179521 - DNA, 25 bp, Saccharomyces pastorianus
gttcaactagtgcagctaacggttt

SEQ ID NO: 179522 - DNA, 25 bp, Saccharomyces pastorianus
actagaggatgcaggcccagctgaa

SEQ ID NO: 179523 - DNA, 25 bp, Saccharomyces pastorianus
atgggtctcagacacctactgttga

SEQ ID NO: 179524 - DNA, 25 bp, Saccharomyces pastorianus
atggcaatgcatctacagcgaatct

SEQ ID NO: 179525 - DNA, 25 bp, Saccharomyces pastorianus
gacgcgaacgcaagaagctccggta

SEQ ID NO: 179526 - DNA, 25 bp, Saccharomyces pastorianus
atagagccagagacgaagcggacga

SEQ ID NO: 179527 - DNA, 25 bp, Saccharomyces pastorianus
aacgcaagaagctccggtaagaaga

SEQ ID NO: 179528 - DNA, 25 bp, Saccharomyces pastorianus
gaagaagacgcgaacgcaagaagct

SEQ ID NO: 179529 - DNA, 25 bp, Saccharomyces pastorianus
agacgaagaagacgcgaacgcaaga

SEQ ID NO: 179530 - DNA, 25 bp, Saccharomyces pastorianus
aagacgcgaacgcaagaagctccgg

SEQ ID NO: 179531 - DNA, 25 bp, Saccharomyces pastorianus
agacgcgaacgcaagaagctccggt

SEQ ID NO: 179532 - DNA, 25 bp, Saccharomyces pastorianus
gccagagacgaagcggacgaagacg

SEQ ID NO: 179533 - DNA, 25 bp, Saccharomyces pastorianus
agaagacgcgaacgcaagaagctcc

SEQ ID NO: 179534 - DNA, 25 bp, Saccharomyces pastorianus
gcgaacgcaagaagctccggtaaga

SEQ ID NO: 179535 - DNA, 25 bp, Saccharomyces pastorianus
aagacgaagaagacgcgaacgcaag

SEQ ID NO: 179536 - DNA, 25 bp, Saccharomyces pastorianus
ccaggcgcaagctcaggctcaagcg

SEQ ID NO: 179537 - DNA, 25 bp, Saccharomyces pastorianus
agctcaagcacaggcccaggcgcag

SEQ ID NO: 179538 - DNA, 25 bp, Saccharomyces pastorianus
aggctcaggtgcaagctcaggctca

SEQ ID NO: 179539 - DNA, 25 bp, Saccharomyces pastorianus
gcaagctcaggctcaagcgcaagct

SEQ ID NO: 179540 - DNA, 25 bp, Saccharomyces pastorianus
gcaagctcaggctcaggcgcaagct

SEQ ID NO: 179541 - DNA, 25 bp, Saccharomyces pastorianus
aagcgcaagctcaagcgcaggctca

SEQ ID NO: 179542 - DNA, 25 bp, Saccharomyces pastorianus
aggtgcaagctcaggctcaggcgca

SEQ ID NO: 179543 - DNA, 25 bp, Saccharomyces pastorianus
gcaacaacaagcccaggcgcaagct

SEQ ID NO: 179544 - DNA, 25 bp, Saccharomyces pastorianus
ggctcaagcacaagctcaggcacag

SEQ ID NO: 179545 - DNA, 25 bp, Saccharomyces pastorianus
aggctcaggcgcaagctcaagctca

SEQ ID NO: 179546 - DNA, 25 bp, Saccharomyces pastorianus
gctcaggctcaggtgcaagctcagg

SEQ ID NO: 179547 - DNA, 25 bp, Saccharomyces pastorianus
gaagccgaacagctaggtgacctaa

SEQ ID NO: 179548 - DNA, 25 bp, Saccharomyces pastorianus
cattattctagttagggatctacca

SEQ ID NO: 179549 - DNA, 25 bp, Saccharomyces pastorianus
cgcctcaccaaaaaccattattcta

SEQ ID NO: 179550 - DNA, 25 bp, Saccharomyces pastorianus
tatgtttccctaaaagatggttatc

SEQ ID NO: 179551 - DNA, 25 bp, Saccharomyces pastorianus
tttcgcctcaccaaaaaccattatt

SEQ ID NO: 179552 - DNA, 25 bp, Saccharomyces pastorianus
ggttatctacaaaacaacgctactg

SEQ ID NO: 179553 - DNA, 25 bp, Saccharomyces pastorianus
aacgctactgaacacatcacaccag

SEQ ID NO: 179554 - DNA, 25 bp, Saccharomyces pastorianus
atcacaccagataatttacgtagag

SEQ ID NO: 179555 - DNA, 25 bp, Saccharomyces pastorianus
taggtgacctaactactttggccaa

SEQ ID NO: 179556 - DNA, 25 bp, Saccharomyces pastorianus
ggatctaccaagaacaaggtcagga

SEQ ID NO: 179557 - DNA, 25 bp, Saccharomyces pastorianus
gaagcatccatctcaaatcacgaaa

SEQ ID NO: 179558 - DNA, 25 bp, Saccharomyces pastorianus
gaatgcaaactacttttcctcgcaa

SEQ ID NO: 179559 - DNA, 25 bp, Saccharomyces pastorianus
ttcccattccccagatattatcagt

SEQ ID NO: 179560 - DNA, 25 bp, Saccharomyces pastorianus
gaggccctatatactgaattctttt

SEQ ID NO: 179561 - DNA, 25 bp, Saccharomyces pastorianus
gtcttcttcttcgtacatcaactat

SEQ ID NO: 179562 - DNA, 25 bp, Saccharomyces pastorianus
caacattaatgcctattctccagtc

SEQ ID NO: 179563 - DNA, 25 bp, Saccharomyces pastorianus
tgcacaaacggaattctctcactct

SEQ ID NO: 179564 - DNA, 25 bp, Saccharomyces pastorianus
gagcaaggccaaactacgttatcga

SEQ ID NO: 179565 - DNA, 25 bp, Saccharomyces pastorianus
gtgttaatgctcatgtgctgccaaa

SEQ ID NO: 179566 - DNA, 25 bp, Saccharomyces pastorianus
taaggtatcgtacaggccctgcaat

SEQ ID NO: 179567 - DNA, 25 bp, Saccharomyces pastorianus
agtctcttcgtcttcatctaacatt

SEQ ID NO: 179568 - DNA, 25 bp, Saccharomyces pastorianus
atgctagatcagcttctttctctac

SEQ ID NO: 179569 - DNA, 25 bp, Saccharomyces pastorianus
gttcaccatactgtacctaatttca

SEQ ID NO: 179570 - DNA, 25 bp, Saccharomyces pastorianus
aaggagggtattgcagttgatcaca

SEQ ID NO: 179571 - DNA, 25 bp, Saccharomyces pastorianus
gtacatcaacgacatagagaatctt

SEQ ID NO: 179572 - DNA, 25 bp, Saccharomyces pastorianus
ggaaaagttgccaataagcacgaaa

SEQ ID NO: 179573 - DNA, 25 bp, Saccharomyces pastorianus
ctatacagagtaatactgccctaga

SEQ ID NO: 179574 - DNA, 25 bp, Saccharomyces pastorianus
gttgatcacattgaacacgccaata

SEQ ID NO: 179575 - DNA, 25 bp, Saccharomyces pastorianus
aacagttcagagtacatcaacgaca

SEQ ID NO: 179576 - DNA, 25 bp, Saccharomyces pastorianus
gtaagcgacgttcaagttcaccata

SEQ ID NO: 179577 - DNA, 25 bp, Saccharomyces pastorianus
agaagagaaagcctgatacaatcaa

SEQ ID NO: 179578 - DNA, 25 bp, Saccharomyces pastorianus
gccaatatctcggacagtaaaacag

SEQ ID NO: 179579 - DNA, 25 bp, Saccharomyces pastorianus
gcacgaaaatattagtagcaagctt

SEQ ID NO: 179580 - DNA, 25 bp, Saccharomyces pastorianus
gccaagccagaggacgttaagagga

SEQ ID NO: 179581 - DNA, 25 bp, Saccharomyces pastorianus
gaggcttgtgtagcaattctaagaa

SEQ ID NO: 179582 - DNA, 25 bp, Saccharomyces pastorianus
attacggcctagatttgattagagg

SEQ ID NO: 179583 - DNA, 25 bp, Saccharomyces pastorianus
ggacgagattcacgctggtgttctt

SEQ ID NO: 179584 - DNA, 25 bp, Saccharomyces pastorianus
aattgtggacgagattcacgctggt

SEQ ID NO: 179585 - DNA, 25 bp, Saccharomyces pastorianus
gtcaaatccttgaaatcagcattgg

SEQ ID NO: 179586 - DNA, 25 bp, Saccharomyces pastorianus
gagaagctacagaaattacggccta

SEQ ID NO: 179587 - DNA, 25 bp, Saccharomyces pastorianus
gagccaaccataagcaaagtcaaat

SEQ ID NO: 179588 - DNA, 25 bp, Saccharomyces pastorianus
atcagcattggaggcttgtgtagca

SEQ ID NO: 179589 - DNA, 25 bp, Saccharomyces pastorianus
gattcacgctggtgttcttgagcca

SEQ ID NO: 179590 - DNA, 25 bp, Saccharomyces pastorianus
gttcttgagccaaccataagcaaag

SEQ ID NO: 179591 - DNA, 25 bp, Saccharomyces pastorianus
caaaggcaaagtgttccgaaagagg

SEQ ID NO: 179592 - DNA, 25 bp, Saccharomyces pastorianus
gaggggtcgtcatcaatgcagaaga

SEQ ID NO: 179593 - DNA, 25 bp, Saccharomyces pastorianus
aggggtcgtcatcaatgcagaagac

SEQ ID NO: 179594 - DNA, 25 bp, Saccharomyces pastorianus
gcaaaggcaaagtgttccgaaagag

SEQ ID NO: 179595 - DNA, 25 bp, Saccharomyces pastorianus
aaagaggggtcgtcatcaatgcaga

SEQ ID NO: 179596 - DNA, 25 bp, Saccharomyces pastorianus
gaaagaggggtcgtcatcaatgcag

SEQ ID NO: 179597 - DNA, 25 bp, Saccharomyces pastorianus
ggtcgtcatcaatgcagaagacgtt

SEQ ID NO: 179598 - DNA, 25 bp, Saccharomyces pastorianus
aagaggggtcgtcatcaatgcagaa

SEQ ID NO: 179599 - DNA, 25 bp, Saccharomyces pastorianus
agaggggtcgtcatcaatgcagaag

SEQ ID NO: 179600 - DNA, 25 bp, Saccharomyces pastorianus
gtgttccgaaagaggggtcgtcatc

SEQ ID NO: 179601 - DNA, 25 bp, Saccharomyces pastorianus
gggtcgtcatcaatgcagaagacgt

SEQ ID NO: 179602 - DNA, 25 bp, Saccharomyces pastorianus
ttatttataagagccgcggtcattt

SEQ ID NO: 179603 - DNA, 25 bp, Saccharomyces pastorianus
aagtggcaccgtaagctcgtcaatg

SEQ ID NO: 179604 - DNA, 25 bp, Saccharomyces pastorianus
acagccactttatttataagagccg

SEQ ID NO: 179605 - DNA, 25 bp, Saccharomyces pastorianus
cagccactttatttataagagccgc

SEQ ID NO: 179606 - DNA, 25 bp, Saccharomyces pastorianus
atggcaacagccactttatttataa

SEQ ID NO: 179607 - DNA, 25 bp, Saccharomyces pastorianus
aatggcaacagccactttatttata

SEQ ID NO: 179608 - DNA, 25 bp, Saccharomyces pastorianus
tggcaacagccactttatttataag

SEQ ID NO: 179609 - DNA, 25 bp, Saccharomyces pastorianus
agccactttatttataagagccgcg

SEQ ID NO: 179610 - DNA, 25 bp, Saccharomyces pastorianus
caatggcaacagccactttatttat

SEQ ID NO: 179611 - DNA, 25 bp, Saccharomyces pastorianus
ggcaacagccactttatttataaga

SEQ ID NO: 179612 - DNA, 25 bp, Saccharomyces pastorianus
tcaatggcaacagccactttattta

SEQ ID NO: 179613 - DNA, 25 bp, Saccharomyces pastorianus
atactagaagtcatacccaaagata

SEQ ID NO: 179614 - DNA, 25 bp, Saccharomyces pastorianus
ataactgttgggattccactgttgt

SEQ ID NO: 179615 - DNA, 25 bp, Saccharomyces pastorianus
ggattccactgttgttagagactat

SEQ ID NO: 179616 - DNA, 25 bp, Saccharomyces pastorianus
gtcataactgttgggattccactgt

SEQ ID NO: 179617 - DNA, 25 bp, Saccharomyces pastorianus
ttttgtcataactgttgggattcca

SEQ ID NO: 179618 - DNA, 25 bp, Saccharomyces pastorianus
gattccactgttgttagagactata

SEQ ID NO: 179619 - DNA, 25 bp, Saccharomyces pastorianus
gataatactagaagtcatacccaaa

SEQ ID NO: 179620 - DNA, 25 bp, Saccharomyces pastorianus
ttgtcataactgttgggattccact

SEQ ID NO: 179621 - DNA, 25 bp, Saccharomyces pastorianus
attccactgttgttagagactataa

SEQ ID NO: 179622 - DNA, 25 bp, Saccharomyces pastorianus
ataaattttgtcataactgttggga

SEQ ID NO: 179623 - DNA, 25 bp, Saccharomyces pastorianus
tccactgttgttagagactataata

SEQ ID NO: 179624 - DNA, 25 bp, Saccharomyces pastorianus
tatcgcgatgatgttccgatcggaa

SEQ ID NO: 179625 - DNA, 25 bp, Saccharomyces pastorianus
aatgatataaatggcctgctatttc

SEQ ID NO: 179626 - DNA, 25 bp, Saccharomyces pastorianus
ccgatcggaagctctaatttgaaag

SEQ ID NO: 179627 - DNA, 25 bp, Saccharomyces pastorianus
tagcagtctttctcccttggagcct

SEQ ID NO: 179628 - DNA, 25 bp, Saccharomyces pastorianus
aaatggcctgctatttctgtatcgc

SEQ ID NO: 179629 - DNA, 25 bp, Saccharomyces pastorianus
atcgctatcgcgatgatgttccgat

SEQ ID NO: 179630 - DNA, 25 bp, Saccharomyces pastorianus
tggcctgctatttctgtatcgctat

SEQ ID NO: 179631 - DNA, 25 bp, Saccharomyces pastorianus
tgctatttctgtatcgctatcgcga

SEQ ID NO: 179632 - DNA, 25 bp, Saccharomyces pastorianus
gttccgatcggaagctctaatttga

SEQ ID NO: 179633 - DNA, 25 bp, Saccharomyces pastorianus
tgattattagcagtctttctccctt

SEQ ID NO: 179634 - DNA, 25 bp, Saccharomyces pastorianus
tattagcagtctttctcccttggag

SEQ ID NO: 179635 - DNA, 25 bp, Saccharomyces pastorianus
gacagtaaccgcaaaattcgctttg

SEQ ID NO: 179636 - DNA, 25 bp, Saccharomyces pastorianus
aggagcttccggaagatccacccta

SEQ ID NO: 179637 - DNA, 25 bp, Saccharomyces pastorianus
tgcgatcgaaactggaaagtggact

SEQ ID NO: 179638 - DNA, 25 bp, Saccharomyces pastorianus
accctaacattcttcgatgcgatcg

SEQ ID NO: 179639 - DNA, 25 bp, Saccharomyces pastorianus
ggaagatccaccctaacattcttcg

SEQ ID NO: 179640 - DNA, 25 bp, Saccharomyces pastorianus
agatccaccctaacattcttcgatg

SEQ ID NO: 179641 - DNA, 25 bp, Saccharomyces pastorianus
taaggaagcaatgtcaaatgaagga

SEQ ID NO: 179642 - DNA, 25 bp, Saccharomyces pastorianus
taaccgcaaaattcgctttggaaca

SEQ ID NO: 179643 - DNA, 25 bp, Saccharomyces pastorianus
gcaaaattcgctttggaacacataa

SEQ ID NO: 179644 - DNA, 25 bp, Saccharomyces pastorianus
gaacacataaaggagcttccggaag

SEQ ID NO: 179645 - DNA, 25 bp, Saccharomyces pastorianus
ctggaaagtggacttggataacatt

SEQ ID NO: 179646 - DNA, 25 bp, Saccharomyces pastorianus
tctgttttcctttctgctccatcat

SEQ ID NO: 179647 - DNA, 25 bp, Saccharomyces pastorianus
tctgccttgttatctatgcttttgc

SEQ ID NO: 179648 - DNA, 25 bp, Saccharomyces pastorianus
tatgcttttgcttggctcttctggg

SEQ ID NO: 179649 - DNA, 25 bp, Saccharomyces pastorianus
gtcacctcaaccttattaatttctt

SEQ ID NO: 179650 - DNA, 25 bp, Saccharomyces pastorianus
tcttcctctttttctgccttgttat

SEQ ID NO: 179651 - DNA, 25 bp, Saccharomyces pastorianus
gccttgttatctttggtatttactt

SEQ ID NO: 179652 - DNA, 25 bp, Saccharomyces pastorianus
actttgccttgtacttcctcttgta

SEQ ID NO: 179653 - DNA, 25 bp, Saccharomyces pastorianus
gtttactgtttcattttctatctca

SEQ ID NO: 179654 - DNA, 25 bp, Saccharomyces pastorianus
cttcctcttgtacatcttctatcga

SEQ ID NO: 179655 - DNA, 25 bp, Saccharomyces pastorianus
tttctatctcattttctgttttcct

SEQ ID NO: 179656 - DNA, 25 bp, Saccharomyces pastorianus
tttcagccttgtcttctgttttgtt

SEQ ID NO: 179657 - DNA, 25 bp, Saccharomyces pastorianus
gcaccacaattcgatttggacaata

SEQ ID NO: 179658 - DNA, 25 bp, Saccharomyces pastorianus
ggaagctcttcgctgtcttgctaca

SEQ ID NO: 179659 - DNA, 25 bp, Saccharomyces pastorianus
acagcttcaatcagatatgcctggt

SEQ ID NO: 179660 - DNA, 25 bp, Saccharomyces pastorianus
gaaactgtttgcgtacgtagcctca

SEQ ID NO: 179661 - DNA, 25 bp, Saccharomyces pastorianus
gatccagagttccaatacacaccgc

SEQ ID NO: 179662 - DNA, 25 bp, Saccharomyces pastorianus
gatgatcctacgaaagcaccacaat

SEQ ID NO: 179663 - DNA, 25 bp, Saccharomyces pastorianus
agcagtgatcatttaaccatctcag

SEQ ID NO: 179664 - DNA, 25 bp, Saccharomyces pastorianus
tgcctggtgagtaacattgcggaat

SEQ ID NO: 179665 - DNA, 25 bp, Saccharomyces pastorianus
agcaagttccagtgcaagcttacaa

SEQ ID NO: 179666 - DNA, 25 bp, Saccharomyces pastorianus
gtacgtagcctcaccatggaatgga

SEQ ID NO: 179667 - DNA, 25 bp, Saccharomyces pastorianus
gaatttatcaagagttttcccctag

SEQ ID NO: 179668 - DNA, 25 bp, Saccharomyces pastorianus
tacgttactagtatattatcatata

SEQ ID NO: 179669 - DNA, 25 bp, Saccharomyces pastorianus
ttacgttactagtatattatcatat

SEQ ID NO: 179670 - DNA, 25 bp, Saccharomyces pastorianus
tagtatttacgttactagtatatta

SEQ ID NO: 179671 - DNA, 25 bp, Saccharomyces pastorianus
atttacgttactagtatattatcat

SEQ ID NO: 179672 - DNA, 25 bp, Saccharomyces pastorianus
cgttactagtatattatcatatacg

SEQ ID NO: 179673 - DNA, 25 bp, Saccharomyces pastorianus
tatttacgttactagtatattatca

SEQ ID NO: 179674 - DNA, 25 bp, Saccharomyces pastorianus
tttacgttactagtatattatcata

SEQ ID NO: 179675 - DNA, 25 bp, Saccharomyces pastorianus
acgttactagtatattatcatatac

SEQ ID NO: 179676 - DNA, 25 bp, Saccharomyces pastorianus
agtatttacgttactagtatattat

SEQ ID NO: 179677 - DNA, 25 bp, Saccharomyces pastorianus
ctatcatctactaactagtatttac

SEQ ID NO: 179678 - DNA, 25 bp, Saccharomyces pastorianus
gtatttacgttactagtatattatc

SEQ ID NO: 179679 - DNA, 25 bp, Saccharomyces pastorianus
accgattcttgttttacgccattgg

SEQ ID NO: 179680 - DNA, 25 bp, Saccharomyces pastorianus
ggtgccagctgtatccgttacgtct

SEQ ID NO: 179681 - DNA, 25 bp, Saccharomyces pastorianus
gcattttctctagcagtttcatcgt

SEQ ID NO: 179682 - DNA, 25 bp, Saccharomyces pastorianus
cgttacgtcttcaaattcatcttcc

SEQ ID NO: 179683 - DNA, 25 bp, Saccharomyces pastorianus
tatcatccataacatcttccatctc

SEQ ID NO: 179684 - DNA, 25 bp, Saccharomyces pastorianus
gccattggaggcgtttgattctgtc

SEQ ID NO: 179685 - DNA, 25 bp, Saccharomyces pastorianus
agcagtttcatcgttatcatccata

SEQ ID NO: 179686 - DNA, 25 bp, Saccharomyces pastorianus
gtttgattctgtctttgcggtgcca

SEQ ID NO: 179687 - DNA, 25 bp, Saccharomyces pastorianus
catcttccaatgcattttctctagc

SEQ ID NO: 179688 - DNA, 25 bp, Saccharomyces pastorianus
gcttcttcagtcttatcattaaccg

SEQ ID NO: 179689 - DNA, 25 bp, Saccharomyces pastorianus
gcatttacagcttcttcagtcttat

SEQ ID NO: 179690 - DNA, 25 bp, Saccharomyces pastorianus
ggaccctcgttcagaagcttattgt

SEQ ID NO: 179691 - DNA, 25 bp, Saccharomyces pastorianus
attttagatttggaccctcgttcag

SEQ ID NO: 179692 - DNA, 25 bp, Saccharomyces pastorianus
ttattgtctaagcctaaattcagtc

SEQ ID NO: 179693 - DNA, 25 bp, Saccharomyces pastorianus
tattgtctaagcctaaattcagtct

SEQ ID NO: 179694 - DNA, 25 bp, Saccharomyces pastorianus
tttagatttggaccctcgttcagaa

SEQ ID NO: 179695 - DNA, 25 bp, Saccharomyces pastorianus
ccctcgttcagaagcttattgtcta

SEQ ID NO: 179696 - DNA, 25 bp, Saccharomyces pastorianus
ttgtctaagcctaaattcagtctgc

SEQ ID NO: 179697 - DNA, 25 bp, Saccharomyces pastorianus
attgtctaagcctaaattcagtctg

SEQ ID NO: 179698 - DNA, 25 bp, Saccharomyces pastorianus
gatttggaccctcgttcagaagctt

SEQ ID NO: 179699 - DNA, 25 bp, Saccharomyces pastorianus
ttttagatttggaccctcgttcaga

SEQ ID NO: 179700 - DNA, 25 bp, Saccharomyces pastorianus
tttggaccctcgttcagaagcttat

SEQ ID NO: 179701 - DNA, 25 bp, Saccharomyces pastorianus
ctgttttatggcgcttatgtgtatt

SEQ ID NO: 179702 - DNA, 25 bp, Saccharomyces pastorianus
tactgttttatggcgcttatgtgta

SEQ ID NO: 179703 - DNA, 25 bp, Saccharomyces pastorianus
ttttgatagacttcgtatgtggagt

SEQ ID NO: 179704 - DNA, 25 bp, Saccharomyces pastorianus
atttttgatagacttcgtatgtgga

SEQ ID NO: 179705 - DNA, 25 bp, Saccharomyces pastorianus
gaacgaatcatacatttttgataga

SEQ ID NO: 179706 - DNA, 25 bp, Saccharomyces pastorianus
atggagatgctcttgtttctgaacg

SEQ ID NO: 179707 - DNA, 25 bp, Saccharomyces pastorianus
actgttttatggcgcttatgtgtat

SEQ ID NO: 179708 - DNA, 25 bp, Saccharomyces pastorianus
aacgaatcatacatttttgatagac

SEQ ID NO: 179709 - DNA, 25 bp, Saccharomyces pastorianus
gtactgttttatggcgcttatgtgt

SEQ ID NO: 179710 - DNA, 25 bp, Saccharomyces pastorianus
atcatacatttttgatagacttcgt

SEQ ID NO: 179711 - DNA, 25 bp, Saccharomyces pastorianus
acgaatcatacatttttgatagact

SEQ ID NO: 179712 - DNA, 25 bp, Saccharomyces pastorianus
gtccaaggccctcaatggcatggat

SEQ ID NO: 179713 - DNA, 25 bp, Saccharomyces pastorianus
atcggacgccggatgtgttgttcag

SEQ ID NO: 179714 - DNA, 25 bp, Saccharomyces pastorianus
tgccgggcatgatcgccgccaagac

SEQ ID NO: 179715 - DNA, 25 bp, Saccharomyces pastorianus
gattcgctgctgtcgatcgtgcaga

SEQ ID NO: 179716 - DNA, 25 bp, Saccharomyces pastorianus
tccgttcgaagtgaaggtggtgtcc

SEQ ID NO: 179717 - DNA, 25 bp, Saccharomyces pastorianus
aagcttgaagccctgggtgttccgt

SEQ ID NO: 179718 - DNA, 25 bp, Saccharomyces pastorianus
aatggcatggattcgctgctgtcga

SEQ ID NO: 179719 - DNA, 25 bp, Saccharomyces pastorianus
tcgatcgtgcagatgccggccggca

SEQ ID NO: 179720 - DNA, 25 bp, Saccharomyces pastorianus
cctgggtgttccgttcgaagtgaag

SEQ ID NO: 179721 - DNA, 25 bp, Saccharomyces pastorianus
gcgtgccggtgcagtccaaggccct

SEQ ID NO: 179722 - DNA, 25 bp, Saccharomyces pastorianus
tgttgttcagttacgccgagcaggc

SEQ ID NO: 179723 - DNA, 25 bp, Saccharomyces pastorianus
aagattaccatcatgtcccttcatt

SEQ ID NO: 179724 - DNA, 25 bp, Saccharomyces pastorianus
ccgccgttatcttcaatgtcattta

SEQ ID NO: 179725 - DNA, 25 bp, Saccharomyces pastorianus
atttcatccttacaatcctcgcaat

SEQ ID NO: 179726 - DNA, 25 bp, Saccharomyces pastorianus
atttcagtataccacaaagcccgcc

SEQ ID NO: 179727 - DNA, 25 bp, Saccharomyces pastorianus
gaaatttcagtacaaccgcaaccgc

SEQ ID NO: 179728 - DNA, 25 bp, Saccharomyces pastorianus
gatagttcggtaagcttgccagcga

SEQ ID NO: 179729 - DNA, 25 bp, Saccharomyces pastorianus
gatatcaaactctcgtgtgggcgaa

SEQ ID NO: 179730 - DNA, 25 bp, Saccharomyces pastorianus
gacctattaggccattcaaaacgaa

SEQ ID NO: 179731 - DNA, 25 bp, Saccharomyces pastorianus
aaacaactctgtgggtcttgaccta

SEQ ID NO: 179732 - DNA, 25 bp, Saccharomyces pastorianus
aaagctctttggtctacgattggcc

SEQ ID NO: 179733 - DNA, 25 bp, Saccharomyces pastorianus
cagcgaaagctgattcacgtcttaa

SEQ ID NO: 179734 - DNA, 25 bp, Saccharomyces pastorianus
tattcctcattccgttttatatgtt

SEQ ID NO: 179735 - DNA, 25 bp, Saccharomyces pastorianus
tcaatccttgcacttcagcttcctc

SEQ ID NO: 179736 - DNA, 25 bp, Saccharomyces pastorianus
attattcctcattccgttttatatg

SEQ ID NO: 179737 - DNA, 25 bp, Saccharomyces pastorianus
attcctcattccgttttatatgttt

SEQ ID NO: 179738 - DNA, 25 bp, Saccharomyces pastorianus
ttcctcattccgttttatatgtttc

SEQ ID NO: 179739 - DNA, 25 bp, Saccharomyces pastorianus
cctcattccgttttatatgtttcat

SEQ ID NO: 179740 - DNA, 25 bp, Saccharomyces pastorianus
taacttcgatgacagcttttcatac

SEQ ID NO: 179741 - DNA, 25 bp, Saccharomyces pastorianus
ttattcctcattccgttttatatgt

SEQ ID NO: 179742 - DNA, 25 bp, Saccharomyces pastorianus
tatgtttcattatcctattgcatta

SEQ ID NO: 179743 - DNA, 25 bp, Saccharomyces pastorianus
ctcattccgttttatatgtttcatt

SEQ ID NO: 179744 - DNA, 25 bp, Saccharomyces pastorianus
tcctcattccgttttatatgtttca

SEQ ID NO: 179745 - DNA, 25 bp, Saccharomyces pastorianus
gaataagatcaaatcaagccagaag

SEQ ID NO: 179746 - DNA, 25 bp, Saccharomyces pastorianus
cgaactcagcttgccctgattataa

SEQ ID NO: 179747 - DNA, 25 bp, Saccharomyces pastorianus
tgtgaggcttcagcgaagtagaaac

SEQ ID NO: 179748 - DNA, 25 bp, Saccharomyces pastorianus
gatttgagataactgcagcgatgtg

SEQ ID NO: 179749 - DNA, 25 bp, Saccharomyces pastorianus
tcaagccagaagaactacctacaaa

SEQ ID NO: 179750 - DNA, 25 bp, Saccharomyces pastorianus
atatttgcatcgaactcagcttgcc

SEQ ID NO: 179751 - DNA, 25 bp, Saccharomyces pastorianus
agaaacgggccatataagtatatct

SEQ ID NO: 179752 - DNA, 25 bp, Saccharomyces pastorianus
gaagctatctcaagattgttctttt

SEQ ID NO: 179753 - DNA, 25 bp, Saccharomyces pastorianus
agcgaagtagaaacgggccatataa

SEQ ID NO: 179754 - DNA, 25 bp, Saccharomyces pastorianus
tttcatcacttaactattgcatcag

SEQ ID NO: 179755 - DNA, 25 bp, Saccharomyces pastorianus
tcagcttgccctgattataataaca

SEQ ID NO: 179756 - DNA, 25 bp, Saccharomyces pastorianus
gaatccataaaagggaatctgcaat

SEQ ID NO: 179757 - DNA, 25 bp, Saccharomyces pastorianus
cataaaagggaatctgcaattctac

SEQ ID NO: 179758 - DNA, 25 bp, Saccharomyces pastorianus
tccataaaagggaatctgcaattct

SEQ ID NO: 179759 - DNA, 25 bp, Saccharomyces pastorianus
atccataaaagggaatctgcaattc

SEQ ID NO: 179760 - DNA, 25 bp, Saccharomyces pastorianus
tcctccaggatttaggaatccataa

SEQ ID NO: 179761 - DNA, 25 bp, Saccharomyces pastorianus
tctcctccaggatttaggaatccat

SEQ ID NO: 179762 - DNA, 25 bp, Saccharomyces pastorianus
aaaagggaatctgcaattctacaca

SEQ ID NO: 179763 - DNA, 25 bp, Saccharomyces pastorianus
ataaaagggaatctgcaattctaca

SEQ ID NO: 179764 - DNA, 25 bp, Saccharomyces pastorianus
taaaagggaatctgcaattctacac

SEQ ID NO: 179765 - DNA, 25 bp, Saccharomyces pastorianus
ccataaaagggaatctgcaattcta

SEQ ID NO: 179766 - DNA, 25 bp, Saccharomyces pastorianus
ctcctccaggatttaggaatccata

SEQ ID NO: 179767 - DNA, 25 bp, Saccharomyces pastorianus
atttgcgaccaaagactcgctcttt

SEQ ID NO: 179768 - DNA, 25 bp, Saccharomyces pastorianus
gttacgctcgaagtaccacagactg

SEQ ID NO: 179769 - DNA, 25 bp, Saccharomyces pastorianus
tcgctctttcccaaagtcgtatctt

SEQ ID NO: 179770 - DNA, 25 bp, Saccharomyces pastorianus
ctgtgaactgtctgcagggagtgct

SEQ ID NO: 179771 - DNA, 25 bp, Saccharomyces pastorianus
aaagaggtgccgaccttgattctcc

SEQ ID NO: 179772 - DNA, 25 bp, Saccharomyces pastorianus
gtcgtatcttccatcgagcgtataa

SEQ ID NO: 179773 - DNA, 25 bp, Saccharomyces pastorianus
gcaattgatttcctactggttagca

SEQ ID NO: 179774 - DNA, 25 bp, Saccharomyces pastorianus
tttccagtttgcgtctgctttagaa

SEQ ID NO: 179775 - DNA, 25 bp, Saccharomyces pastorianus
attccgaaggtcttctagcgggtga

SEQ ID NO: 179776 - DNA, 25 bp, Saccharomyces pastorianus
gagtgctgaatatcattcctttgca

SEQ ID NO: 179777 - DNA, 25 bp, Saccharomyces pastorianus
gagatttcctatgttcattccgaag

SEQ ID NO: 179778 - DNA, 25 bp, Saccharomyces pastorianus
acacttcttcgtcgccattaacgtt

SEQ ID NO: 179779 - DNA, 25 bp, Saccharomyces pastorianus
tggttttgctcatgacacagttatt

SEQ ID NO: 179780 - DNA, 25 bp, Saccharomyces pastorianus
gtccgtcaaggacattttagtcaaa

SEQ ID NO: 179781 - DNA, 25 bp, Saccharomyces pastorianus
gttgaccaactacgagacattttct

SEQ ID NO: 179782 - DNA, 25 bp, Saccharomyces pastorianus
ttaggcaaactgcagattcaacttt

SEQ ID NO: 179783 - DNA, 25 bp, Saccharomyces pastorianus
tgatgcatcgctagatctgccaatg

SEQ ID NO: 179784 - DNA, 25 bp, Saccharomyces pastorianus
aaaggcgataggaactcagtgactg

SEQ ID NO: 179785 - DNA, 25 bp, Saccharomyces pastorianus
gaacttccaggaggcaaggcagatt

SEQ ID NO: 179786 - DNA, 25 bp, Saccharomyces pastorianus
tctgccaatgacaagtgaacccaaa

SEQ ID NO: 179787 - DNA, 25 bp, Saccharomyces pastorianus
aggaaattcatcttctacctctgac

SEQ ID NO: 179788 - DNA, 25 bp, Saccharomyces pastorianus
atttttgttgtctagctttctacta

SEQ ID NO: 179789 - DNA, 25 bp, Saccharomyces pastorianus
ctccatggcccatctctcactaaat

SEQ ID NO: 179790 - DNA, 25 bp, Saccharomyces pastorianus
actccactccatggcccatctctca

SEQ ID NO: 179791 - DNA, 25 bp, Saccharomyces pastorianus
ctctcactaaatcagtaccaaatgc

SEQ ID NO: 179792 - DNA, 25 bp, Saccharomyces pastorianus
ataaagcccatcattatccacattt

SEQ ID NO: 179793 - DNA, 25 bp, Saccharomyces pastorianus
cataaagcccatcattatccacatt

SEQ ID NO: 179794 - DNA, 25 bp, Saccharomyces pastorianus
tcagtaccaaatgcactcacatcat

SEQ ID NO: 179795 - DNA, 25 bp, Saccharomyces pastorianus
atggcccatctctcactaaatcagt

SEQ ID NO: 179796 - DNA, 25 bp, Saccharomyces pastorianus
aaagcccatcattatccacatttta

SEQ ID NO: 179797 - DNA, 25 bp, Saccharomyces pastorianus
taaagcccatcattatccacatttt

SEQ ID NO: 179798 - DNA, 25 bp, Saccharomyces pastorianus
ccataaagcccatcattatccacat

SEQ ID NO: 179799 - DNA, 25 bp, Saccharomyces pastorianus
ccatctctcactaaatcagtaccaa

SEQ ID NO: 179800 - DNA, 25 bp, Saccharomyces pastorianus
aatatcgtgcccacgcaaacagggt

SEQ ID NO: 179801 - DNA, 25 bp, Saccharomyces pastorianus
tcctactaattctcctcagcaaaat

SEQ ID NO: 179802 - DNA, 25 bp, Saccharomyces pastorianus
taaattctcagggtacaggctacaa

SEQ ID NO: 179803 - DNA, 25 bp, Saccharomyces pastorianus
tggtaaccaacctcaaagtcctcct

SEQ ID NO: 179804 - DNA, 25 bp, Saccharomyces pastorianus
actgggaaccagtctatatcggata

SEQ ID NO: 179805 - DNA, 25 bp, Saccharomyces pastorianus
gcaagcccagttccagcaacaacaa

SEQ ID NO: 179806 - DNA, 25 bp, Saccharomyces pastorianus
caatacattcaacctcatcaacaac

SEQ ID NO: 179807 - DNA, 25 bp, Saccharomyces pastorianus
tggagaggcacgtattcctgcacaa

SEQ ID NO: 179808 - DNA, 25 bp, Saccharomyces pastorianus
actggtataagctactctcagccac

SEQ ID NO: 179809 - DNA, 25 bp, Saccharomyces pastorianus
cagcgacttgaataccttgttagca

SEQ ID NO: 179810 - DNA, 25 bp, Saccharomyces pastorianus
tcaatacgcccaaaacttccaacaa

SEQ ID NO: 179811 - DNA, 25 bp, Saccharomyces pastorianus
aaagttctactccactcaaattgaa

SEQ ID NO: 179812 - DNA, 25 bp, Saccharomyces pastorianus
agaaaagttctactccactcaaatt

SEQ ID NO: 179813 - DNA, 25 bp, Saccharomyces pastorianus
gttctactccactcaaattgaagaa

SEQ ID NO: 179814 - DNA, 25 bp, Saccharomyces pastorianus
gaaaagttctactccactcaaattg

SEQ ID NO: 179815 - DNA, 25 bp, Saccharomyces pastorianus
aagttctactccactcaaattgaag

SEQ ID NO: 179816 - DNA, 25 bp, Saccharomyces pastorianus
gaactagaaaagttctactccactc

SEQ ID NO: 179817 - DNA, 25 bp, Saccharomyces pastorianus
tctactccactcaaattgaagaatt

SEQ ID NO: 179818 - DNA, 25 bp, Saccharomyces pastorianus
tagaaaagttctactccactcaaat

SEQ ID NO: 179819 - DNA, 25 bp, Saccharomyces pastorianus
aaaagttctactccactcaaattga

SEQ ID NO: 179820 - DNA, 25 bp, Saccharomyces pastorianus
agttctactccactcaaattgaaga

SEQ ID NO: 179821 - DNA, 25 bp, Saccharomyces pastorianus
ctagaaaagttctactccactcaaa

SEQ ID NO: 179822 - DNA, 25 bp, Saccharomyces pastorianus
tattatcttgcgagcatgtgcgctc

SEQ ID NO: 179823 - DNA, 25 bp, Saccharomyces pastorianus
gattgggtgatattttgcatattat

SEQ ID NO: 179824 - DNA, 25 bp, Saccharomyces pastorianus
gcgagcatgtgcgctcaatttcggg

SEQ ID NO: 179825 - DNA, 25 bp, Saccharomyces pastorianus
ttatcttgcgagcatgtgcgctcaa

SEQ ID NO: 179826 - DNA, 25 bp, Saccharomyces pastorianus
atattatcttgcgagcatgtgcgct

SEQ ID NO: 179827 - DNA, 25 bp, Saccharomyces pastorianus
gcatattatcttgcgagcatgtgcg

SEQ ID NO: 179828 - DNA, 25 bp, Saccharomyces pastorianus
atcttgcgagcatgtgcgctcaatt

SEQ ID NO: 179829 - DNA, 25 bp, Saccharomyces pastorianus
ttgcgagcatgtgcgctcaatttcg

SEQ ID NO: 179830 - DNA, 25 bp, Saccharomyces pastorianus
attatcttgcgagcatgtgcgctca

SEQ ID NO: 179831 - DNA, 25 bp, Saccharomyces pastorianus
tatcttgcgagcatgtgcgctcaat

SEQ ID NO: 179832 - DNA, 25 bp, Saccharomyces pastorianus
tcttgcgagcatgtgcgctcaattt

SEQ ID NO: 179833 - DNA, 25 bp, Saccharomyces pastorianus
ccaccgatctggactatttgcaaca

SEQ ID NO: 179834 - DNA, 25 bp, Saccharomyces pastorianus
caccgatctggactatttgcaacaa

SEQ ID NO: 179835 - DNA, 25 bp, Saccharomyces pastorianus
gccaccgatctggactatttgcaac

SEQ ID NO: 179836 - DNA, 25 bp, Saccharomyces pastorianus
atttgcaacaacccgtccaacagca

SEQ ID NO: 179837 - DNA, 25 bp, Saccharomyces pastorianus
acttcgccaccgatctggactattt

SEQ ID NO: 179838 - DNA, 25 bp, Saccharomyces pastorianus
tatttgcaacaacccgtccaacagc

SEQ ID NO: 179839 - DNA, 25 bp, Saccharomyces pastorianus
ttcgccaccgatctggactatttgc

SEQ ID NO: 179840 - DNA, 25 bp, Saccharomyces pastorianus
cgccaccgatctggactatttgcaa

SEQ ID NO: 179841 - DNA, 25 bp, Saccharomyces pastorianus
tcgccaccgatctggactatttgca

SEQ ID NO: 179842 - DNA, 25 bp, Saccharomyces pastorianus
cttcgccaccgatctggactatttg

SEQ ID NO: 179843 - DNA, 25 bp, Saccharomyces pastorianus
ctatttgcaacaacccgtccaacag

SEQ ID NO: 179844 - DNA, 25 bp, Saccharomyces pastorianus
tatatcctttttccactgcgattgg

SEQ ID NO: 179845 - DNA, 25 bp, Saccharomyces pastorianus
gtaagccattcttctttttcaagca

SEQ ID NO: 179846 - DNA, 25 bp, Saccharomyces pastorianus
cattttccatttgtttcagctcttt

SEQ ID NO: 179847 - DNA, 25 bp, Saccharomyces pastorianus
ctgcgattggtactctgtaagccat

SEQ ID NO: 179848 - DNA, 25 bp, Saccharomyces pastorianus
gttcaacatcgttcaacatttcctg

SEQ ID NO: 179849 - DNA, 25 bp, Saccharomyces pastorianus
gttcaatttttatcttttcttcacg

SEQ ID NO: 179850 - DNA, 25 bp, Saccharomyces pastorianus
tcgtttctgttagttcatctttgag

SEQ ID NO: 179851 - DNA, 25 bp, Saccharomyces pastorianus
ggcattgattttctctttcgtttct

SEQ ID NO: 179852 - DNA, 25 bp, Saccharomyces pastorianus
cgacgctctttcattttcaaactgt

SEQ ID NO: 179853 - DNA, 25 bp, Saccharomyces pastorianus
gattttatttcttacctcttctatt

SEQ ID NO: 179854 - DNA, 25 bp, Saccharomyces pastorianus
attagatgccgctagctgctttaaa

SEQ ID NO: 179855 - DNA, 25 bp, Saccharomyces pastorianus
gcagtggcacagaaacaaccaggaa

SEQ ID NO: 179856 - DNA, 25 bp, Saccharomyces pastorianus
aacaaccaggaatactatagtcata

SEQ ID NO: 179857 - DNA, 25 bp, Saccharomyces pastorianus
gtatatattggctatgcagacccct

SEQ ID NO: 179858 - DNA, 25 bp, Saccharomyces pastorianus
gtggcacagaaacaaccaggaatac

SEQ ID NO: 179859 - DNA, 25 bp, Saccharomyces pastorianus
tagtcataggcaatacaaggtatat

SEQ ID NO: 179860 - DNA, 25 bp, Saccharomyces pastorianus
tgcagtggcacagaaacaaccagga

SEQ ID NO: 179861 - DNA, 25 bp, Saccharomyces pastorianus
cagtggcacagaaacaaccaggaat

SEQ ID NO: 179862 - DNA, 25 bp, Saccharomyces pastorianus
agtggcacagaaacaaccaggaata

SEQ ID NO: 179863 - DNA, 25 bp, Saccharomyces pastorianus
atgcagtggcacagaaacaaccagg

SEQ ID NO: 179864 - DNA, 25 bp, Saccharomyces pastorianus
atatattggctatgcagacccctcc

SEQ ID NO: 179865 - DNA, 25 bp, Saccharomyces pastorianus
ggaatactatagtcataggcaatac

SEQ ID NO: 179866 - DNA, 25 bp, Saccharomyces pastorianus
gacgtactgtgacgatttctctcat

SEQ ID NO: 179867 - DNA, 25 bp, Saccharomyces pastorianus
agtttcactctgacctgcttttgaa

SEQ ID NO: 179868 - DNA, 25 bp, Saccharomyces pastorianus
gtgttttctagtttgatgccgttga

SEQ ID NO: 179869 - DNA, 25 bp, Saccharomyces pastorianus
gtttcaccaagcagtcatggctcga

SEQ ID NO: 179870 - DNA, 25 bp, Saccharomyces pastorianus
gattaactcgctccttactgaagat

SEQ ID NO: 179871 - DNA, 25 bp, Saccharomyces pastorianus
gtttccgaaactgtctatgctctag

SEQ ID NO: 179872 - DNA, 25 bp, Saccharomyces pastorianus
aaaggcgcagggacgtctcagattg

SEQ ID NO: 179873 - DNA, 25 bp, Saccharomyces pastorianus
catggctcgatattctcgcatgcga

SEQ ID NO: 179874 - DNA, 25 bp, Saccharomyces pastorianus
gtatgattcctcaagcatctcgtag

SEQ ID NO: 179875 - DNA, 25 bp, Saccharomyces pastorianus
ttgcactctaattcttcatcatcca

SEQ ID NO: 179876 - DNA, 25 bp, Saccharomyces pastorianus
gacgtacaagccttagctcatatgg

SEQ ID NO: 179877 - DNA, 25 bp, Saccharomyces pastorianus
tccaaccgttagattatttaacttg

SEQ ID NO: 179878 - DNA, 25 bp, Saccharomyces pastorianus
cttcgtggaagaggaatagcaatct

SEQ ID NO: 179879 - DNA, 25 bp, Saccharomyces pastorianus
taataatgactgttgcttacaatca

SEQ ID NO: 179880 - DNA, 25 bp, Saccharomyces pastorianus
aatagcaatcttgttgacgaggttt

SEQ ID NO: 179881 - DNA, 25 bp, Saccharomyces pastorianus
ggtatatatccaaccgttagattat

SEQ ID NO: 179882 - DNA, 25 bp, Saccharomyces pastorianus
atttaacttggatgatattttggac

SEQ ID NO: 179883 - DNA, 25 bp, Saccharomyces pastorianus
taggcttgccgagaatccaaggtat

SEQ ID NO: 179884 - DNA, 25 bp, Saccharomyces pastorianus
tataaagggtgtcagttgcggacat

SEQ ID NO: 179885 - DNA, 25 bp, Saccharomyces pastorianus
gtccgctggtataggcttgccgaga

SEQ ID NO: 179886 - DNA, 25 bp, Saccharomyces pastorianus
gaatccaaggtatatatccaaccgt

SEQ ID NO: 179887 - DNA, 25 bp, Saccharomyces pastorianus
tattttggacgaaataacttcgtgg

SEQ ID NO: 179888 - DNA, 25 bp, Saccharomyces pastorianus
tctagcgggatcgaaccgctgatcc

SEQ ID NO: 179889 - DNA, 25 bp, Saccharomyces pastorianus
atggtctctagcgggatcgaaccgc

SEQ ID NO: 179890 - DNA, 25 bp, Saccharomyces pastorianus
cgaaccgctgatccccgcgttatta

SEQ ID NO: 179891 - DNA, 25 bp, Saccharomyces pastorianus
gtctctagcgggatcgaaccgctga

SEQ ID NO: 179892 - DNA, 25 bp, Saccharomyces pastorianus
ctagcgggatcgaaccgctgatccc

SEQ ID NO: 179893 - DNA, 25 bp, Saccharomyces pastorianus
tctctagcgggatcgaaccgctgat

SEQ ID NO: 179894 - DNA, 25 bp, Saccharomyces pastorianus
ctctagcgggatcgaaccgctgatc

SEQ ID NO: 179895 - DNA, 25 bp, Saccharomyces pastorianus
ggtctctagcgggatcgaaccgctg

SEQ ID NO: 179896 - DNA, 25 bp, Saccharomyces pastorianus
ggatcgaaccgctgatccccgcgtt

SEQ ID NO: 179897 - DNA, 25 bp, Saccharomyces pastorianus
tagcgggatcgaaccgctgatcccc

SEQ ID NO: 179898 - DNA, 25 bp, Saccharomyces pastorianus
gctgatccccgcgttattagcacgg

SEQ ID NO: 179899 - DNA, 25 bp, Saccharomyces pastorianus
tataaccaactactagtccttcctt

SEQ ID NO: 179900 - DNA, 25 bp, Saccharomyces pastorianus
aaaggtcgagtctgttgctgctgcc

SEQ ID NO: 179901 - DNA, 25 bp, Saccharomyces pastorianus
atgtgtttccttctcgagacctcgg

SEQ ID NO: 179902 - DNA, 25 bp, Saccharomyces pastorianus
gtatgaaattatccgctctattagc

SEQ ID NO: 179903 - DNA, 25 bp, Saccharomyces pastorianus
tacctcggcggctgctgatggaaag

SEQ ID NO: 179904 - DNA, 25 bp, Saccharomyces pastorianus
aacgacaagcgtgccgttgtcaccg

SEQ ID NO: 179905 - DNA, 25 bp, Saccharomyces pastorianus
agctgtccaccatagtgacaaccac

SEQ ID NO: 179906 - DNA, 25 bp, Saccharomyces pastorianus
gtgtattcattccttaaacttcgtt

SEQ ID NO: 179907 - DNA, 25 bp, Saccharomyces pastorianus
gttgtcaccgttactcagtacgtca

SEQ ID NO: 179908 - DNA, 25 bp, Saccharomyces pastorianus
agacggcgctgttgttattccagct

SEQ ID NO: 179909 - DNA, 25 bp, Saccharomyces pastorianus
tcagtacgtcaacgcagacggcgct

SEQ ID NO: 179910 - DNA, 25 bp, Saccharomyces pastorianus
cttctcctagttccagactgaatta

SEQ ID NO: 179911 - DNA, 25 bp, Saccharomyces pastorianus
gttccagactgaattatcgaaactt

SEQ ID NO: 179912 - DNA, 25 bp, Saccharomyces pastorianus
aagatgccatcgagtcagcttctcc

SEQ ID NO: 179913 - DNA, 25 bp, Saccharomyces pastorianus
attactggcgaaggcggcatcccaa

SEQ ID NO: 179914 - DNA, 25 bp, Saccharomyces pastorianus
aaattactggcgaaggcggcatccc

SEQ ID NO: 179915 - DNA, 25 bp, Saccharomyces pastorianus
cctgaagatgccatcgagtcagctt

SEQ ID NO: 179916 - DNA, 25 bp, Saccharomyces pastorianus
gaacgacaagctcaggaaaattact

SEQ ID NO: 179917 - DNA, 25 bp, Saccharomyces pastorianus
atcgagtcagcttctcctagttcca

SEQ ID NO: 179918 - DNA, 25 bp, Saccharomyces pastorianus
agatcgaacgacaagctcaggaaaa

SEQ ID NO: 179919 - DNA, 25 bp, Saccharomyces pastorianus
tcaaggcagcggagatcgaacgaca

SEQ ID NO: 179920 - DNA, 25 bp, Saccharomyces pastorianus
agcttctcctagttccagactgaat

SEQ ID NO: 179921 - DNA, 25 bp, Saccharomyces pastorianus
ggagaaggcataatgatcctacttt

SEQ ID NO: 179922 - DNA, 25 bp, Saccharomyces pastorianus
ttaatggatactgccgggagaaggc

SEQ ID NO: 179923 - DNA, 25 bp, Saccharomyces pastorianus
ctacgttgaactatttgaagctggt

SEQ ID NO: 179924 - DNA, 25 bp, Saccharomyces pastorianus
gtcgccattgaagtctttcgctgac

SEQ ID NO: 179925 - DNA, 25 bp, Saccharomyces pastorianus
gaagtctttcgctgaccaagccaag

SEQ ID NO: 179926 - DNA, 25 bp, Saccharomyces pastorianus
tggtaaccaaaattgcaaagcaagc

SEQ ID NO: 179927 - DNA, 25 bp, Saccharomyces pastorianus
aagcaagccatcaaatattctcgtg

SEQ ID NO: 179928 - DNA, 25 bp, Saccharomyces pastorianus
ggttatggtggatctgacttggtaa

SEQ ID NO: 179929 - DNA, 25 bp, Saccharomyces pastorianus
aaactggtaatgactacgttgaact

SEQ ID NO: 179930 - DNA, 25 bp, Saccharomyces pastorianus
tattctcgtgatcaaaacttcgata

SEQ ID NO: 179931 - DNA, 25 bp, Saccharomyces pastorianus
ggtggatctgacttggtaaccaaaa

SEQ ID NO: 179932 - DNA, 25 bp, Saccharomyces pastorianus
aggattatggaacaccccgtactat

SEQ ID NO: 179933 - DNA, 25 bp, Saccharomyces pastorianus
tggtgcactatcttccttcaataac

SEQ ID NO: 179934 - DNA, 25 bp, Saccharomyces pastorianus
gtactatttctactgtggtcggaca

SEQ ID NO: 179935 - DNA, 25 bp, Saccharomyces pastorianus
tgtttcggcatactggtggtttcca

SEQ ID NO: 179936 - DNA, 25 bp, Saccharomyces pastorianus
tttcatctactagccctatcatgga

SEQ ID NO: 179937 - DNA, 25 bp, Saccharomyces pastorianus
gccaccgttttttgttgaagcttct

SEQ ID NO: 179938 - DNA, 25 bp, Saccharomyces pastorianus
gaagagtttcgacgtactctcgctt

SEQ ID NO: 179939 - DNA, 25 bp, Saccharomyces pastorianus
caaccactggctcgtctaatgaaga

SEQ ID NO: 179940 - DNA, 25 bp, Saccharomyces pastorianus
cctgccgtttacactatagcttttt

SEQ ID NO: 179941 - DNA, 25 bp, Saccharomyces pastorianus
tgctgtgtggctttgatgtcttatt

SEQ ID NO: 179942 - DNA, 25 bp, Saccharomyces pastorianus
gtcctggcccagattttcgaatgtg

SEQ ID NO: 179943 - DNA, 25 bp, Saccharomyces pastorianus
acgcgattctcatgtcgtatccaaa

SEQ ID NO: 179944 - DNA, 25 bp, Saccharomyces pastorianus
ggtagctcctctggtagcgctagct

SEQ ID NO: 179945 - DNA, 25 bp, Saccharomyces pastorianus
atgcgggtgctgtattattcggcca

SEQ ID NO: 179946 - DNA, 25 bp, Saccharomyces pastorianus
gtccgtgatgcagtatatgcctttc

SEQ ID NO: 179947 - DNA, 25 bp, Saccharomyces pastorianus
actgtcaatccaggtggtagctcct

SEQ ID NO: 179948 - DNA, 25 bp, Saccharomyces pastorianus
ccaaccgttggtttgacttcaagat

SEQ ID NO: 179949 - DNA, 25 bp, Saccharomyces pastorianus
agcgctagctccgtagctgctaata

SEQ ID NO: 179950 - DNA, 25 bp, Saccharomyces pastorianus
atgctcttgggttctgtagtgccac

SEQ ID NO: 179951 - DNA, 25 bp, Saccharomyces pastorianus
gacggtagtattatcgatcctgcaa

SEQ ID NO: 179952 - DNA, 25 bp, Saccharomyces pastorianus
cgttgtccttttaatcttactgtca

SEQ ID NO: 179953 - DNA, 25 bp, Saccharomyces pastorianus
tattattcggccactctacgttaag

SEQ ID NO: 179954 - DNA, 25 bp, Saccharomyces pastorianus
ggatggagtttcacgtaaatactgc

SEQ ID NO: 179955 - DNA, 25 bp, Saccharomyces pastorianus
aatgccaatagagccgcacatgtaa

SEQ ID NO: 179956 - DNA, 25 bp, Saccharomyces pastorianus
tgatgcggttttgtttttgggcagc

SEQ ID NO: 179957 - DNA, 25 bp, Saccharomyces pastorianus
aatagagccgcacatgtaattactg

SEQ ID NO: 179958 - DNA, 25 bp, Saccharomyces pastorianus
gattcctgtgcaaagtttgacaaga

SEQ ID NO: 179959 - DNA, 25 bp, Saccharomyces pastorianus
gtaattactggttcacactcgtggg

SEQ ID NO: 179960 - DNA, 25 bp, Saccharomyces pastorianus
gagccgcacatgtaattactggttc

SEQ ID NO: 179961 - DNA, 25 bp, Saccharomyces pastorianus
gggcccacacgattcctgtgcaaag

SEQ ID NO: 179962 - DNA, 25 bp, Saccharomyces pastorianus
acacgattcctgtgcaaagtttgac

SEQ ID NO: 179963 - DNA, 25 bp, Saccharomyces pastorianus
gaacaatgccaatagagccgcacat

SEQ ID NO: 179964 - DNA, 25 bp, Saccharomyces pastorianus
atactgccaaaggtgatgcggtttt

SEQ ID NO: 179965 - DNA, 25 bp, Saccharomyces pastorianus
aatcggcgacccatttaacttaatg

SEQ ID NO: 179966 - DNA, 25 bp, Saccharomyces pastorianus
gaatggattcattccagccatatat

SEQ ID NO: 179967 - DNA, 25 bp, Saccharomyces pastorianus
aaattggccacttcattccctgaag

SEQ ID NO: 179968 - DNA, 25 bp, Saccharomyces pastorianus
ggaaaacactgcttacctgttcaaa

SEQ ID NO: 179969 - DNA, 25 bp, Saccharomyces pastorianus
gaagtggctttatgggcttattccc

SEQ ID NO: 179970 - DNA, 25 bp, Saccharomyces pastorianus
ttaatggaaactgcctacttgaatg

SEQ ID NO: 179971 - DNA, 25 bp, Saccharomyces pastorianus
ttattcccaactagccgagcaaggc

SEQ ID NO: 179972 - DNA, 25 bp, Saccharomyces pastorianus
tgaggatcctccaagaaccacagat

SEQ ID NO: 179973 - DNA, 25 bp, Saccharomyces pastorianus
gaggacagcatttgccgcattaatc

SEQ ID NO: 179974 - DNA, 25 bp, Saccharomyces pastorianus
aaacgaagctattatggcacctaaa

SEQ ID NO: 179975 - DNA, 25 bp, Saccharomyces pastorianus
gagcgtgcatagatctgggcttaat

SEQ ID NO: 179976 - DNA, 25 bp, Saccharomyces pastorianus
acatcatcagatacagcccacatta

SEQ ID NO: 179977 - DNA, 25 bp, Saccharomyces pastorianus
tgtaatgaaccttccatcggattat

SEQ ID NO: 179978 - DNA, 25 bp, Saccharomyces pastorianus
gaagtggcctacgattaacgccttc

SEQ ID NO: 179979 - DNA, 25 bp, Saccharomyces pastorianus
atttgccgtttctactccttgtaat

SEQ ID NO: 179980 - DNA, 25 bp, Saccharomyces pastorianus
agatgtaccccagaagactttgagt

SEQ ID NO: 179981 - DNA, 25 bp, Saccharomyces pastorianus
aataatggccggcttgcgctgacac

SEQ ID NO: 179982 - DNA, 25 bp, Saccharomyces pastorianus
atattgctgtatgtgctccggcaga

SEQ ID NO: 179983 - DNA, 25 bp, Saccharomyces pastorianus
atgattgccggtcttgaatatagcc

SEQ ID NO: 179984 - DNA, 25 bp, Saccharomyces pastorianus
aacgccttcctttatccttagatgt

SEQ ID NO: 179985 - DNA, 25 bp, Saccharomyces pastorianus
attctgttacttaaggcccaatggg

SEQ ID NO: 179986 - DNA, 25 bp, Saccharomyces pastorianus
gggagagacacatcgacatcatcag

SEQ ID NO: 179987 - DNA, 25 bp, Saccharomyces pastorianus
agtacaggccccaccgggctatggt

SEQ ID NO: 179988 - DNA, 25 bp, Saccharomyces pastorianus
ggcagtacaggccccaccgggctat

SEQ ID NO: 179989 - DNA, 25 bp, Saccharomyces pastorianus
gtacaggccccaccgggctatggta

SEQ ID NO: 179990 - DNA, 25 bp, Saccharomyces pastorianus
ccctctgtggcagtacaggccccac

SEQ ID NO: 179991 - DNA, 25 bp, Saccharomyces pastorianus
tggcagtacaggccccaccgggcta

SEQ ID NO: 179992 - DNA, 25 bp, Saccharomyces pastorianus
tctgtggcagtacaggccccaccgg

SEQ ID NO: 179993 - DNA, 25 bp, Saccharomyces pastorianus
ctctgtggcagtacaggccccaccg

SEQ ID NO: 179994 - DNA, 25 bp, Saccharomyces pastorianus
tgtggcagtacaggccccaccgggc

SEQ ID NO: 179995 - DNA, 25 bp, Saccharomyces pastorianus
ctgtggcagtacaggccccaccggg

SEQ ID NO: 179996 - DNA, 25 bp, Saccharomyces pastorianus
acaggccccaccgggctatggtaag

SEQ ID NO: 179997 - DNA, 25 bp, Saccharomyces pastorianus
cctctgtggcagtacaggccccacc

SEQ ID NO: 179998 - DNA, 25 bp, Saccharomyces pastorianus
aatgctactaccagctgccagacat

SEQ ID NO: 179999 - DNA, 25 bp, Saccharomyces pastorianus
agctgccagacatctactgtcagga

SEQ ID NO: 180000 - DNA, 25 bp, Saccharomyces pastorianus
accagctgccagacatctactgtca

SEQ ID NO: 180001 - DNA, 25 bp, Saccharomyces pastorianus
actaccagctgccagacatctactg

SEQ ID NO: 180002 - DNA, 25 bp, Saccharomyces pastorianus
ctgtcaggactagtaacagactacc

SEQ ID NO: 180003 - DNA, 25 bp, Saccharomyces pastorianus
gccagacatctactgtcaggactag

SEQ ID NO: 180004 - DNA, 25 bp, Saccharomyces pastorianus
ctgccagacatctactgtcaggact

SEQ ID NO: 180005 - DNA, 25 bp, Saccharomyces pastorianus
taatgctactaccagctgccagaca

SEQ ID NO: 180006 - DNA, 25 bp, Saccharomyces pastorianus
gacatctactgtcaggactagtaac

SEQ ID NO: 180007 - DNA, 25 bp, Saccharomyces pastorianus
gctactaccagctgccagacatcta

SEQ ID NO: 180008 - DNA, 25 bp, Saccharomyces pastorianus
atctactgtcaggactagtaacaga

SEQ ID NO: 180009 - DNA, 25 bp, Saccharomyces pastorianus
cagcgattgaagttaatttgaccat

SEQ ID NO: 180010 - DNA, 25 bp, Saccharomyces pastorianus
gatgtaatcttaacaagaaatagtg

SEQ ID NO: 180011 - DNA, 25 bp, Saccharomyces pastorianus
gctgatgtaatcttaacaagaaata

SEQ ID NO: 180012 - DNA, 25 bp, Saccharomyces pastorianus
tgctgatgtaatcttaacaagaaat

SEQ ID NO: 180013 - DNA, 25 bp, Saccharomyces pastorianus
tagtgctgatgtaatcttaacaaga

SEQ ID NO: 180014 - DNA, 25 bp, Saccharomyces pastorianus
ctgatgtaatcttaacaagaaatag

SEQ ID NO: 180015 - DNA, 25 bp, Saccharomyces pastorianus
ttagtgctgatgtaatcttaacaag

SEQ ID NO: 180016 - DNA, 25 bp, Saccharomyces pastorianus
ccagcagcgattgaagttaatttga

SEQ ID NO: 180017 - DNA, 25 bp, Saccharomyces pastorianus
agtgctgatgtaatcttaacaagaa

SEQ ID NO: 180018 - DNA, 25 bp, Saccharomyces pastorianus
gtgctgatgtaatcttaacaagaaa

SEQ ID NO: 180019 - DNA, 25 bp, Saccharomyces pastorianus
gttagtgctgatgtaatcttaacaa

SEQ ID NO: 180020 - DNA, 25 bp, Saccharomyces pastorianus
tatatatatggatgcatctctctgc

SEQ ID NO: 180021 - DNA, 25 bp, Saccharomyces pastorianus
atatggatgcatctctctgcatata

SEQ ID NO: 180022 - DNA, 25 bp, Saccharomyces pastorianus
gcatctctctgcatataaaattaat

SEQ ID NO: 180023 - DNA, 25 bp, Saccharomyces pastorianus
ggatgcatctctctgcatataaaat

SEQ ID NO: 180024 - DNA, 25 bp, Saccharomyces pastorianus
atggatgcatctctctgcatataaa

SEQ ID NO: 180025 - DNA, 25 bp, Saccharomyces pastorianus
atatatatggatgcatctctctgca

SEQ ID NO: 180026 - DNA, 25 bp, Saccharomyces pastorianus
atatatggatgcatctctctgcata

SEQ ID NO: 180027 - DNA, 25 bp, Saccharomyces pastorianus
tcagaaaggagagccagaattatat

SEQ ID NO: 180028 - DNA, 25 bp, Saccharomyces pastorianus
gcatataaaattaatttccctttcg

SEQ ID NO: 180029 - DNA, 25 bp, Saccharomyces pastorianus
tatggatgcatctctctgcatataa

SEQ ID NO: 180030 - DNA, 25 bp, Saccharomyces pastorianus
aaggagagccagaattatatatata

SEQ ID NO: 180031 - DNA, 25 bp, Saccharomyces pastorianus
gatatgtatacgaatacatcttaag

SEQ ID NO: 180032 - DNA, 25 bp, Saccharomyces pastorianus
caagagaccatgatatgtatacgaa

SEQ ID NO: 180033 - DNA, 25 bp, Saccharomyces pastorianus
gaccatgatatgtatacgaatacat

SEQ ID NO: 180034 - DNA, 25 bp, Saccharomyces pastorianus
agaccatgatatgtatacgaataca

SEQ ID NO: 180035 - DNA, 25 bp, Saccharomyces pastorianus
gagaccatgatatgtatacgaatac

SEQ ID NO: 180036 - DNA, 25 bp, Saccharomyces pastorianus
atgatatgtatacgaatacatctta

SEQ ID NO: 180037 - DNA, 25 bp, Saccharomyces pastorianus
accatgatatgtatacgaatacatc

SEQ ID NO: 180038 - DNA, 25 bp, Saccharomyces pastorianus
agagaccatgatatgtatacgaata

SEQ ID NO: 180039 - DNA, 25 bp, Saccharomyces pastorianus
aagagaccatgatatgtatacgaat

SEQ ID NO: 180040 - DNA, 25 bp, Saccharomyces pastorianus
catgatatgtatacgaatacatctt

SEQ ID NO: 180041 - DNA, 25 bp, Saccharomyces pastorianus
ccatgatatgtatacgaatacatct

SEQ ID NO: 180042 - DNA, 25 bp, Saccharomyces pastorianus
tacgttactagtatattatcatata

SEQ ID NO: 180043 - DNA, 25 bp, Saccharomyces pastorianus
ttacgttactagtatattatcatat

SEQ ID NO: 180044 - DNA, 25 bp, Saccharomyces pastorianus
tagtatttacgttactagtatatta

SEQ ID NO: 180045 - DNA, 25 bp, Saccharomyces pastorianus
atttacgttactagtatattatcat

SEQ ID NO: 180046 - DNA, 25 bp, Saccharomyces pastorianus
cgttactagtatattatcatatacg

SEQ ID NO: 180047 - DNA, 25 bp, Saccharomyces pastorianus
tatttacgttactagtatattatca

SEQ ID NO: 180048 - DNA, 25 bp, Saccharomyces pastorianus
tttacgttactagtatattatcata

SEQ ID NO: 180049 - DNA, 25 bp, Saccharomyces pastorianus
acgttactagtatattatcatatac

SEQ ID NO: 180050 - DNA, 25 bp, Saccharomyces pastorianus
agtatttacgttactagtatattat

SEQ ID NO: 180051 - DNA, 25 bp, Saccharomyces pastorianus
ctatcatctactaactagtatttac

SEQ ID NO: 180052 - DNA, 25 bp, Saccharomyces pastorianus
gtatttacgttactagtatattatc

SEQ ID NO: 180053 - DNA, 25 bp, Saccharomyces pastorianus
tttaccagaaaactctacgatcgat

SEQ ID NO: 180054 - DNA, 25 bp, Saccharomyces pastorianus
aaacgtaggcagacgagctcagtca

SEQ ID NO: 180055 - DNA, 25 bp, Saccharomyces pastorianus
atgacctactatccactagtgacca

SEQ ID NO: 180056 - DNA, 25 bp, Saccharomyces pastorianus
gaggagatgtgtcaatttaccagaa

SEQ ID NO: 180057 - DNA, 25 bp, Saccharomyces pastorianus
ccactagtgaccatccaggattctt

SEQ ID NO: 180058 - DNA, 25 bp, Saccharomyces pastorianus
actgtgggagtttggccaaacccag

SEQ ID NO: 180059 - DNA, 25 bp, Saccharomyces pastorianus
cagacgagctcagtcaagaggagat

SEQ ID NO: 180060 - DNA, 25 bp, Saccharomyces pastorianus
gaacatatccatcagtacatccgat

SEQ ID NO: 180061 - DNA, 25 bp, Saccharomyces pastorianus
acatccgatgagttcgatattctga

SEQ ID NO: 180062 - DNA, 25 bp, Saccharomyces pastorianus
gaaagcaaccctgaacatatccatc

SEQ ID NO: 180063 - DNA, 25 bp, Saccharomyces pastorianus
gaaaactctacgatcgataacagaa

SEQ ID NO: 180064 - DNA, 25 bp, Saccharomyces pastorianus
ttaatcccagatgctacaaaacaat

SEQ ID NO: 180065 - DNA, 25 bp, Saccharomyces pastorianus
gagaaacctttcacttgccacattt

SEQ ID NO: 180066 - DNA, 25 bp, Saccharomyces pastorianus
ggtagcacgcaaaagacccgtggaa

SEQ ID NO: 180067 - DNA, 25 bp, Saccharomyces pastorianus
acaagagcatcttaagagacatgtt

SEQ ID NO: 180068 - DNA, 25 bp, Saccharomyces pastorianus
ttacatatgtgcgagaaacctttca

SEQ ID NO: 180069 - DNA, 25 bp, Saccharomyces pastorianus
ccttctcgtctcatagtctaatatc

SEQ ID NO: 180070 - DNA, 25 bp, Saccharomyces pastorianus
tcggagattcaaaagacaagagcat

SEQ ID NO: 180071 - DNA, 25 bp, Saccharomyces pastorianus
gaaagaaggcaggtagcacgcaaaa

SEQ ID NO: 180072 - DNA, 25 bp, Saccharomyces pastorianus
agaaaaccctctttaatcccagatg

SEQ ID NO: 180073 - DNA, 25 bp, Saccharomyces pastorianus
aacctttcacttgccacatttgtaa

SEQ ID NO: 180074 - DNA, 25 bp, Saccharomyces pastorianus
ggttgtgaattttgtgatcggagat

SEQ ID NO: 180075 - DNA, 25 bp, Saccharomyces pastorianus
tattattgccttattaaaaatggaa

SEQ ID NO: 180076 - DNA, 25 bp, Saccharomyces pastorianus
tgccttattaaaaatggaatcccaa

SEQ ID NO: 180077 - DNA, 25 bp, Saccharomyces pastorianus
tattgccttattaaaaatggaatcc

SEQ ID NO: 180078 - DNA, 25 bp, Saccharomyces pastorianus
ttgtgtagaattgcagattcccttt

SEQ ID NO: 180079 - DNA, 25 bp, Saccharomyces pastorianus
tctagtacattctacatacctaata

SEQ ID NO: 180080 - DNA, 25 bp, Saccharomyces pastorianus
atattattgccttattaaaaatgga

SEQ ID NO: 180081 - DNA, 25 bp, Saccharomyces pastorianus
ttattgccttattaaaaatggaatc

SEQ ID NO: 180082 - DNA, 25 bp, Saccharomyces pastorianus
aacttctagtacattctacatacct

SEQ ID NO: 180083 - DNA, 25 bp, Saccharomyces pastorianus
attattgccttattaaaaatggaat

SEQ ID NO: 180084 - DNA, 25 bp, Saccharomyces pastorianus
tatggattcctaaatcctcgaggag

SEQ ID NO: 180085 - DNA, 25 bp, Saccharomyces pastorianus
ttgccttattaaaaatggaatccca

SEQ ID NO: 180086 - DNA, 25 bp, Saccharomyces pastorianus
tgcactcacatcattatgcacggca

SEQ ID NO: 180087 - DNA, 25 bp, Saccharomyces pastorianus
tcacatcattatgcacggcacttgc

SEQ ID NO: 180088 - DNA, 25 bp, Saccharomyces pastorianus
cacatcattatgcacggcacttgcc

SEQ ID NO: 180089 - DNA, 25 bp, Saccharomyces pastorianus
actcacatcattatgcacggcactt

SEQ ID NO: 180090 - DNA, 25 bp, Saccharomyces pastorianus
acatcattatgcacggcacttgcct

SEQ ID NO: 180091 - DNA, 25 bp, Saccharomyces pastorianus
atgcactcacatcattatgcacggc

SEQ ID NO: 180092 - DNA, 25 bp, Saccharomyces pastorianus
ctcacatcattatgcacggcacttg

SEQ ID NO: 180093 - DNA, 25 bp, Saccharomyces pastorianus
gcactcacatcattatgcacggcac

SEQ ID NO: 180094 - DNA, 25 bp, Saccharomyces pastorianus
cactcacatcattatgcacggcact

SEQ ID NO: 180095 - DNA, 25 bp, Saccharomyces pastorianus
cttgttcttatcttattatagtatt

SEQ ID NO: 180096 - DNA, 25 bp, Saccharomyces pastorianus
ccccagtatgattttcgatgataat

SEQ ID NO: 180097 - DNA, 25 bp, Saccharomyces pastorianus
atgataattatgttagggacccgga

SEQ ID NO: 180098 - DNA, 25 bp, Saccharomyces pastorianus
gggtccccagtatgattttcgatga

SEQ ID NO: 180099 - DNA, 25 bp, Saccharomyces pastorianus
gtccccagtatgattttcgatgata

SEQ ID NO: 180100 - DNA, 25 bp, Saccharomyces pastorianus
ggtccccagtatgattttcgatgat

SEQ ID NO: 180101 - DNA, 25 bp, Saccharomyces pastorianus
taattatgttagggacccggatatc

SEQ ID NO: 180102 - DNA, 25 bp, Saccharomyces pastorianus
tcttcttgttcttatcttattatag

SEQ ID NO: 180103 - DNA, 25 bp, Saccharomyces pastorianus
tatatattttatttcttcctatggg

SEQ ID NO: 180104 - DNA, 25 bp, Saccharomyces pastorianus
tccccagtatgattttcgatgataa

SEQ ID NO: 180105 - DNA, 25 bp, Saccharomyces pastorianus
ccagtatgattttcgatgataatta

SEQ ID NO: 180106 - DNA, 25 bp, Saccharomyces pastorianus
caaactatcttacgccacatgaaac

SEQ ID NO: 180107 - DNA, 25 bp, Saccharomyces pastorianus
actatcttacgccacatgaaaccgc

SEQ ID NO: 180108 - DNA, 25 bp, Saccharomyces pastorianus
caccgcaatgaaaaaagcaaggctg

SEQ ID NO: 180109 - DNA, 25 bp, Saccharomyces pastorianus
gattcaaactatcttacgccacatg

SEQ ID NO: 180110 - DNA, 25 bp, Saccharomyces pastorianus
ggttgacgattcaaactatcttacg

SEQ ID NO: 180111 - DNA, 25 bp, Saccharomyces pastorianus
tggtggccaccgcaatgaaaaaagc

SEQ ID NO: 180112 - DNA, 25 bp, Saccharomyces pastorianus
cattggcggtggtggccaccgcaat

SEQ ID NO: 180113 - DNA, 25 bp, Saccharomyces pastorianus
cacatgaaaccgcattggcggtggt

SEQ ID NO: 180114 - DNA, 25 bp, Saccharomyces pastorianus
atcttacgccacatgaaaccgcatt

SEQ ID NO: 180115 - DNA, 25 bp, Saccharomyces pastorianus
gacgattcaaactatcttacgccac

SEQ ID NO: 180116 - DNA, 25 bp, Saccharomyces pastorianus
cttacgccacatgaaaccgcattgg

SEQ ID NO: 180117 - DNA, 25 bp, Saccharomyces pastorianus
gaagtgttacccatcgtggttcaca

SEQ ID NO: 180118 - DNA, 25 bp, Saccharomyces pastorianus
gttaatgatacacaaccagcgataa

SEQ ID NO: 180119 - DNA, 25 bp, Saccharomyces pastorianus
ggaaaactttgttgactatctgtaa

SEQ ID NO: 180120 - DNA, 25 bp, Saccharomyces pastorianus
gcactagcagcgcaatcagttgaat

SEQ ID NO: 180121 - DNA, 25 bp, Saccharomyces pastorianus
cacacctttgttagacaggacgaag

SEQ ID NO: 180122 - DNA, 25 bp, Saccharomyces pastorianus
gtaagtactatgacccattggcccc

SEQ ID NO: 180123 - DNA, 25 bp, Saccharomyces pastorianus
acggacgcaacgaggacatgttcaa

SEQ ID NO: 180124 - DNA, 25 bp, Saccharomyces pastorianus
gaaacacaagacaccccaaattaga

SEQ ID NO: 180125 - DNA, 25 bp, Saccharomyces pastorianus
ggataccgtcaagaatttacctagt

SEQ ID NO: 180126 - DNA, 25 bp, Saccharomyces pastorianus
tggcggtagtagtaacacttctgaa

SEQ ID NO: 180127 - DNA, 25 bp, Saccharomyces pastorianus
gtttcattagtcttcacacctttgt

SEQ ID NO: 180128 - DNA, 25 bp, Saccharomyces pastorianus
caaggcgaagcagtcctcgttggtc

SEQ ID NO: 180129 - DNA, 25 bp, Saccharomyces pastorianus
atggcgaaatccagatagcatcggc

SEQ ID NO: 180130 - DNA, 25 bp, Saccharomyces pastorianus
aggcgaagcagtcctcgttggtccc

SEQ ID NO: 180131 - DNA, 25 bp, Saccharomyces pastorianus
agcagtcctcgttggtcccgtacgt

SEQ ID NO: 180132 - DNA, 25 bp, Saccharomyces pastorianus
gaagcagtcctcgttggtcccgtac

SEQ ID NO: 180133 - DNA, 25 bp, Saccharomyces pastorianus
aaggcgaagcagtcctcgttggtcc

SEQ ID NO: 180134 - DNA, 25 bp, Saccharomyces pastorianus
tcgttggtcccgtacgttggccaga

SEQ ID NO: 180135 - DNA, 25 bp, Saccharomyces pastorianus
cagtcctcgttggtcccgtacgttg

SEQ ID NO: 180136 - DNA, 25 bp, Saccharomyces pastorianus
tggtcccgtacgttggccagacctt

SEQ ID NO: 180137 - DNA, 25 bp, Saccharomyces pastorianus
gcgaaatccagatagcatcggcacc

SEQ ID NO: 180138 - DNA, 25 bp, Saccharomyces pastorianus
cgagtcgtagaatggcgaaatccag

SEQ ID NO: 180139 - DNA, 25 bp, Saccharomyces pastorianus
aggtatccttctaacatgtctgcgc

SEQ ID NO: 180140 - DNA, 25 bp, Saccharomyces pastorianus
atggcttgcaattgacatccgtcag

SEQ ID NO: 180141 - DNA, 25 bp, Saccharomyces pastorianus
agacagtttggttaatggcttgcaa

SEQ ID NO: 180142 - DNA, 25 bp, Saccharomyces pastorianus
tgcgcacgggttgacagccgtatac

SEQ ID NO: 180143 - DNA, 25 bp, Saccharomyces pastorianus
tctaacatgtctgcgcacgggttga

SEQ ID NO: 180144 - DNA, 25 bp, Saccharomyces pastorianus
gtagcagatcctcctgatgtcattg

SEQ ID NO: 180145 - DNA, 25 bp, Saccharomyces pastorianus
gtcacacggtgtagtcattgccgga

SEQ ID NO: 180146 - DNA, 25 bp, Saccharomyces pastorianus
gacatccgtcagtaggtatccttct

SEQ ID NO: 180147 - DNA, 25 bp, Saccharomyces pastorianus
agccgtatacgtagcagatcctcct

SEQ ID NO: 180148 - DNA, 25 bp, Saccharomyces pastorianus
gcttttttaaagtcacacggtgtag

SEQ ID NO: 180149 - DNA, 25 bp, Saccharomyces pastorianus
atcctcctgatgtcattgctttttt

SEQ ID NO: 180150 - DNA, 25 bp, Saccharomyces pastorianus
aaattcggaaccattttggcatcgt

SEQ ID NO: 180151 - DNA, 25 bp, Saccharomyces pastorianus
ttcctctgatggtaaggtctccgta

SEQ ID NO: 180152 - DNA, 25 bp, Saccharomyces pastorianus
atgccattggcgttaactctgcttc

SEQ ID NO: 180153 - DNA, 25 bp, Saccharomyces pastorianus
tctgcttctgtcaactctgttcaat

SEQ ID NO: 180154 - DNA, 25 bp, Saccharomyces pastorianus
ccttgcaacctgctcttctgacaag

SEQ ID NO: 180155 - DNA, 25 bp, Saccharomyces pastorianus
gttgactggccacgaaggcccagtt

SEQ ID NO: 180156 - DNA, 25 bp, Saccharomyces pastorianus
gactattatgggaagcgccttgcaa

SEQ ID NO: 180157 - DNA, 25 bp, Saccharomyces pastorianus
accattttggcatcgtgttcttatg

SEQ ID NO: 180158 - DNA, 25 bp, Saccharomyces pastorianus
aatcatcgatgctcatgccattggc

SEQ ID NO: 180159 - DNA, 25 bp, Saccharomyces pastorianus
gttaatagacacgttgactggccac

SEQ ID NO: 180160 - DNA, 25 bp, Saccharomyces pastorianus
gattgggcacatcctaaattcggaa

SEQ ID NO: 180161 - DNA, 25 bp, Saccharomyces pastorianus
aaagcagttatgatcttacacacct

SEQ ID NO: 180162 - DNA, 25 bp, Saccharomyces pastorianus
cacacctgcttaattgttaaatcaa

SEQ ID NO: 180163 - DNA, 25 bp, Saccharomyces pastorianus
gggatgggatccaccttcagcaaat

SEQ ID NO: 180164 - DNA, 25 bp, Saccharomyces pastorianus
ttatgatcttacacacctgcttaat

SEQ ID NO: 180165 - DNA, 25 bp, Saccharomyces pastorianus
gttatgatcttacacacctgcttaa

SEQ ID NO: 180166 - DNA, 25 bp, Saccharomyces pastorianus
atgatcttacacacctgcttaattg

SEQ ID NO: 180167 - DNA, 25 bp, Saccharomyces pastorianus
agttatgatcttacacacctgctta

SEQ ID NO: 180168 - DNA, 25 bp, Saccharomyces pastorianus
gatcttacacacctgcttaattgtt

SEQ ID NO: 180169 - DNA, 25 bp, Saccharomyces pastorianus
ttattcatctttaaagcagttatga

SEQ ID NO: 180170 - DNA, 25 bp, Saccharomyces pastorianus
gatgggatccaccttcagcaaatgc

SEQ ID NO: 180171 - DNA, 25 bp, Saccharomyces pastorianus
cttacacacctgcttaattgttaaa

SEQ ID NO: 180172 - DNA, 25 bp, Saccharomyces pastorianus
ctcacatcactattaacggcacttg

SEQ ID NO: 180173 - DNA, 25 bp, Saccharomyces pastorianus
actcacatcactattaacggcactt

SEQ ID NO: 180174 - DNA, 25 bp, Saccharomyces pastorianus
acatcactattaacggcacttgcct

SEQ ID NO: 180175 - DNA, 25 bp, Saccharomyces pastorianus
tcacatcactattaacggcacttgc

SEQ ID NO: 180176 - DNA, 25 bp, Saccharomyces pastorianus
atgcactcacatcactattaacggc

SEQ ID NO: 180177 - DNA, 25 bp, Saccharomyces pastorianus
aatgcactcacatcactattaacgg

SEQ ID NO: 180178 - DNA, 25 bp, Saccharomyces pastorianus
atcactattaacggcacttgcctca

SEQ ID NO: 180179 - DNA, 25 bp, Saccharomyces pastorianus
catcactattaacggcacttgcctc

SEQ ID NO: 180180 - DNA, 25 bp, Saccharomyces pastorianus
tctcatattgcactccactccatgg

SEQ ID NO: 180181 - DNA, 25 bp, Saccharomyces pastorianus
cactcacatcactattaacggcact

SEQ ID NO: 180182 - DNA, 25 bp, Saccharomyces pastorianus
cacatcactattaacggcacttgcc

SEQ ID NO: 180183 - DNA, 25 bp, Saccharomyces pastorianus
cgccagtcagttcgtgtaaattgta

SEQ ID NO: 180184 - DNA, 25 bp, Saccharomyces pastorianus
gccagtgtcaagctttcgagtcatt

SEQ ID NO: 180185 - DNA, 25 bp, Saccharomyces pastorianus
ggtgaagcaaatctcaaggttgttt

SEQ ID NO: 180186 - DNA, 25 bp, Saccharomyces pastorianus
tactctagccgttgtggaatggact

SEQ ID NO: 180187 - DNA, 25 bp, Saccharomyces pastorianus
cagactccattattgctatacttat

SEQ ID NO: 180188 - DNA, 25 bp, Saccharomyces pastorianus
gttaccataggtaaaagcactgcta

SEQ ID NO: 180189 - DNA, 25 bp, Saccharomyces pastorianus
tttcgagtcattcttgtgatgatca

SEQ ID NO: 180190 - DNA, 25 bp, Saccharomyces pastorianus
atgaatgtggattcagctcccgcca

SEQ ID NO: 180191 - DNA, 25 bp, Saccharomyces pastorianus
tattgttaatactctagccgttgtg

SEQ ID NO: 180192 - DNA, 25 bp, Saccharomyces pastorianus
gactgttttactttatttctcaata

SEQ ID NO: 180193 - DNA, 25 bp, Saccharomyces pastorianus
gaatgacactgtagcagactccatt

SEQ ID NO: 180194 - DNA, 25 bp, Saccharomyces pastorianus
gtacgagtggatcacgattccacaa

SEQ ID NO: 180195 - DNA, 25 bp, Saccharomyces pastorianus
aacttctccaaaagacgagagtcat

SEQ ID NO: 180196 - DNA, 25 bp, Saccharomyces pastorianus
ggatcacgattccacaaactgaatg

SEQ ID NO: 180197 - DNA, 25 bp, Saccharomyces pastorianus
tgtttcaagtaacacaacttcaata

SEQ ID NO: 180198 - DNA, 25 bp, Saccharomyces pastorianus
cacaacttcaataatgactgatgat

SEQ ID NO: 180199 - DNA, 25 bp, Saccharomyces pastorianus
gacgagagtcatagattctctaaga

SEQ ID NO: 180200 - DNA, 25 bp, Saccharomyces pastorianus
ttaagtacgagtggatcacgattcc

SEQ ID NO: 180201 - DNA, 25 bp, Saccharomyces pastorianus
gattccacaaactgaatgggcattc

SEQ ID NO: 180202 - DNA, 25 bp, Saccharomyces pastorianus
attcacaagatataagcacatccga

SEQ ID NO: 180203 - DNA, 25 bp, Saccharomyces pastorianus
aagcacatccgaagaccgcgattca

SEQ ID NO: 180204 - DNA, 25 bp, Saccharomyces pastorianus
ataagcacatccgaagaccgcgatt

SEQ ID NO: 180205 - DNA, 25 bp, Saccharomyces pastorianus
atactaaaagtctcctcgagggtag

SEQ ID NO: 180206 - DNA, 25 bp, Saccharomyces pastorianus
aaaggggaagcgatatttctacata

SEQ ID NO: 180207 - DNA, 25 bp, Saccharomyces pastorianus
taaaagtctcctcgagggtagagga

SEQ ID NO: 180208 - DNA, 25 bp, Saccharomyces pastorianus
actaaaagtctcctcgagggtagag

SEQ ID NO: 180209 - DNA, 25 bp, Saccharomyces pastorianus
aaagtctcctcgagggtagaggaat

SEQ ID NO: 180210 - DNA, 25 bp, Saccharomyces pastorianus
ctaaaagtctcctcgagggtagagg

SEQ ID NO: 180211 - DNA, 25 bp, Saccharomyces pastorianus
caaaggggaagcgatatttctacat

SEQ ID NO: 180212 - DNA, 25 bp, Saccharomyces pastorianus
ctcgagggtagaggaatcctcaaag

SEQ ID NO: 180213 - DNA, 25 bp, Saccharomyces pastorianus
aagtctcctcgagggtagaggaatc

SEQ ID NO: 180214 - DNA, 25 bp, Saccharomyces pastorianus
tcgagggtagaggaatcctcaaagg

SEQ ID NO: 180215 - DNA, 25 bp, Saccharomyces pastorianus
tactaaaagtctcctcgagggtaga

SEQ ID NO: 180216 - DNA, 25 bp, Saccharomyces pastorianus
gtacgctgtacatttaccaaggcca

SEQ ID NO: 180217 - DNA, 25 bp, Saccharomyces pastorianus
aagaatccggagatggcgcttcagt

SEQ ID NO: 180218 - DNA, 25 bp, Saccharomyces pastorianus
aagaagtttcttgagggcattgccc

SEQ ID NO: 180219 - DNA, 25 bp, Saccharomyces pastorianus
gttgatgcgtcttctaggattttga

SEQ ID NO: 180220 - DNA, 25 bp, Saccharomyces pastorianus
tacgatttccagttcatcgacttgg

SEQ ID NO: 180221 - DNA, 25 bp, Saccharomyces pastorianus
agatgctagaccctggtatttcttg

SEQ ID NO: 180222 - DNA, 25 bp, Saccharomyces pastorianus
gaaaccgaattcagcgctccaaaag

SEQ ID NO: 180223 - DNA, 25 bp, Saccharomyces pastorianus
gcgcttcagttctcaacttctggaa

SEQ ID NO: 180224 - DNA, 25 bp, Saccharomyces pastorianus
tagagtgttcgttgaccggtacgct

SEQ ID NO: 180225 - DNA, 25 bp, Saccharomyces pastorianus
agaggaacccaatgctggcttcact

SEQ ID NO: 180226 - DNA, 25 bp, Saccharomyces pastorianus
ggaaaagggccctccaagccagaag

SEQ ID NO: 180227 - DNA, 25 bp, Saccharomyces pastorianus
ttcgacctcgcgcttcgaagtaaag

SEQ ID NO: 180228 - DNA, 25 bp, Saccharomyces pastorianus
accgccacttgccacactcaccttc

SEQ ID NO: 180229 - DNA, 25 bp, Saccharomyces pastorianus
gccacttgccacactcaccttcact

SEQ ID NO: 180230 - DNA, 25 bp, Saccharomyces pastorianus
aggtattcgacctcgcgcttcgaag

SEQ ID NO: 180231 - DNA, 25 bp, Saccharomyces pastorianus
ccacttgccacactcaccttcactt

SEQ ID NO: 180232 - DNA, 25 bp, Saccharomyces pastorianus
tcgacctcgcgcttcgaagtaaagg

SEQ ID NO: 180233 - DNA, 25 bp, Saccharomyces pastorianus
acttgccacactcaccttcacttct

SEQ ID NO: 180234 - DNA, 25 bp, Saccharomyces pastorianus
ccaccgccacttgccacactcacct

SEQ ID NO: 180235 - DNA, 25 bp, Saccharomyces pastorianus
cttgccacactcaccttcacttcta

SEQ ID NO: 180236 - DNA, 25 bp, Saccharomyces pastorianus
accaccgccacttgccacactcacc

SEQ ID NO: 180237 - DNA, 25 bp, Saccharomyces pastorianus
ctctataccaccactaccaccaccg

SEQ ID NO: 180238 - DNA, 25 bp, Saccharomyces pastorianus
atgtggtcatgcgtagtccctctca

SEQ ID NO: 180239 - DNA, 25 bp, Saccharomyces pastorianus
aactcctcggatttgcctgagaaca

SEQ ID NO: 180240 - DNA, 25 bp, Saccharomyces pastorianus
attgacgttctttgcgaaacagctc

SEQ ID NO: 180241 - DNA, 25 bp, Saccharomyces pastorianus
gcatacttattttctactctaggga

SEQ ID NO: 180242 - DNA, 25 bp, Saccharomyces pastorianus
agactggttgtctgaaccggccaac

SEQ ID NO: 180243 - DNA, 25 bp, Saccharomyces pastorianus
aaagcccaattggacccatcaagaa

SEQ ID NO: 180244 - DNA, 25 bp, Saccharomyces pastorianus
gaaacagctcggttccaggaatttg

SEQ ID NO: 180245 - DNA, 25 bp, Saccharomyces pastorianus
actgtcacaacttatggctgcttct

SEQ ID NO: 180246 - DNA, 25 bp, Saccharomyces pastorianus
actggcaacatcacgcatacttatt

SEQ ID NO: 180247 - DNA, 25 bp, Saccharomyces pastorianus
aaggtgcgttggttgattactcatt

SEQ ID NO: 180248 - DNA, 25 bp, Saccharomyces pastorianus
gggatcatgcatttattactgtcac

SEQ ID NO: 180249 - DNA, 25 bp, Saccharomyces pastorianus
atctactaactagtatttatgttac

SEQ ID NO: 180250 - DNA, 25 bp, Saccharomyces pastorianus
ctactaactagtatttatgttacta

SEQ ID NO: 180251 - DNA, 25 bp, Saccharomyces pastorianus
tctactaactagtatttatgttact

SEQ ID NO: 180252 - DNA, 25 bp, Saccharomyces pastorianus
tgttactagtatattatcatatacg

SEQ ID NO: 180253 - DNA, 25 bp, Saccharomyces pastorianus
catctactaactagtatttatgtta

SEQ ID NO: 180254 - DNA, 25 bp, Saccharomyces pastorianus
tatgttactagtatattatcatata

SEQ ID NO: 180255 - DNA, 25 bp, Saccharomyces pastorianus
gaataaaaatcaactatcatctact

SEQ ID NO: 180256 - DNA, 25 bp, Saccharomyces pastorianus
gttggaataaaaatcaactatcatc

SEQ ID NO: 180257 - DNA, 25 bp, Saccharomyces pastorianus
ggaataaaaatcaactatcatctac

SEQ ID NO: 180258 - DNA, 25 bp, Saccharomyces pastorianus
aataaaaatcaactatcatctacta

SEQ ID NO: 180259 - DNA, 25 bp, Saccharomyces pastorianus
tcatctactaactagtatttatgtt

SEQ ID NO: 180260 - DNA, 25 bp, Saccharomyces pastorianus
gtggaccatccctattacattagat

SEQ ID NO: 180261 - DNA, 25 bp, Saccharomyces pastorianus
atttgctaaccaaattagacctgca

SEQ ID NO: 180262 - DNA, 25 bp, Saccharomyces pastorianus
gtatggaacttgactcctagacaac

SEQ ID NO: 180263 - DNA, 25 bp, Saccharomyces pastorianus
tggtgggttttctcctctgactggg

SEQ ID NO: 180264 - DNA, 25 bp, Saccharomyces pastorianus
ctgttgttacagattcgagattagc

SEQ ID NO: 180265 - DNA, 25 bp, Saccharomyces pastorianus
gactcctagacaactatgtgatatt

SEQ ID NO: 180266 - DNA, 25 bp, Saccharomyces pastorianus
gaatgaattgttatctgaagcgcaa

SEQ ID NO: 180267 - DNA, 25 bp, Saccharomyces pastorianus
aacgattactcctctgttgttacag

SEQ ID NO: 180268 - DNA, 25 bp, Saccharomyces pastorianus
agcagacggcacattgtggaccatc

SEQ ID NO: 180269 - DNA, 25 bp, Saccharomyces pastorianus
tctcctctgactgggtttttgaacg

SEQ ID NO: 180270 - DNA, 25 bp, Saccharomyces pastorianus
aagcgcaatcttcggacattttagt

SEQ ID NO: 180271 - DNA, 25 bp, Saccharomyces pastorianus
gggtgtctgaatttgccttacatgt

SEQ ID NO: 180272 - DNA, 25 bp, Saccharomyces pastorianus
cgctaccattaacggctgaaagtct

SEQ ID NO: 180273 - DNA, 25 bp, Saccharomyces pastorianus
tccgagcttggatgggtgtctgaat

SEQ ID NO: 180274 - DNA, 25 bp, Saccharomyces pastorianus
aaaccaagttttcagccgctaccat

SEQ ID NO: 180275 - DNA, 25 bp, Saccharomyces pastorianus
atatctttgcaatttccgagcttgg

SEQ ID NO: 180276 - DNA, 25 bp, Saccharomyces pastorianus
cctagagctgggttgtcatgttgtt

SEQ ID NO: 180277 - DNA, 25 bp, Saccharomyces pastorianus
gaaaagttattcgttgcctctatta

SEQ ID NO: 180278 - DNA, 25 bp, Saccharomyces pastorianus
ctcctctgttgataggcgtgcgaga

SEQ ID NO: 180279 - DNA, 25 bp, Saccharomyces pastorianus
gagatattcacgatcctgatactga

SEQ ID NO: 180280 - DNA, 25 bp, Saccharomyces pastorianus
catgttgttgatgtgaccagccata

SEQ ID NO: 180281 - DNA, 25 bp, Saccharomyces pastorianus
ggtgccattaattgcaattcctaca

SEQ ID NO: 180282 - DNA, 25 bp, Saccharomyces pastorianus
gtactatgccgaaactcagcgacga

SEQ ID NO: 180283 - DNA, 25 bp, Saccharomyces pastorianus
tgcgttttactgagcaagcctaaat

SEQ ID NO: 180284 - DNA, 25 bp, Saccharomyces pastorianus
tactgagcaagcctaaattagaagt

SEQ ID NO: 180285 - DNA, 25 bp, Saccharomyces pastorianus
ttaggaatgccgaaacatttgataa

SEQ ID NO: 180286 - DNA, 25 bp, Saccharomyces pastorianus
aaatttgcgttttactgagcaagcc

SEQ ID NO: 180287 - DNA, 25 bp, Saccharomyces pastorianus
taagttcgttggcaacaggcaaaag

SEQ ID NO: 180288 - DNA, 25 bp, Saccharomyces pastorianus
taaattagaagtcgaaagctaccta

SEQ ID NO: 180289 - DNA, 25 bp, Saccharomyces pastorianus
atgccgaaactcagcgacgaagaag

SEQ ID NO: 180290 - DNA, 25 bp, Saccharomyces pastorianus
gagtctattaggaatgccgaaacat

SEQ ID NO: 180291 - DNA, 25 bp, Saccharomyces pastorianus
gaaggtattcttgaagagtctatta

SEQ ID NO: 180292 - DNA, 25 bp, Saccharomyces pastorianus
gcaaaagtactatgccgaaactcag

SEQ ID NO: 180293 - DNA, 25 bp, Saccharomyces pastorianus
ctcttcgaccttcaggtattcgact

SEQ ID NO: 180294 - DNA, 25 bp, Saccharomyces pastorianus
gtcttgtatcggacccaagggaacg

SEQ ID NO: 180295 - DNA, 25 bp, Saccharomyces pastorianus
aacgactggtactgcagctgtggct

SEQ ID NO: 180296 - DNA, 25 bp, Saccharomyces pastorianus
agggaacgactggtactgcagctgt

SEQ ID NO: 180297 - DNA, 25 bp, Saccharomyces pastorianus
gctcttcgaccttcaggtattcgac

SEQ ID NO: 180298 - DNA, 25 bp, Saccharomyces pastorianus
tgtatgcgtactcgtcgtcgctgat

SEQ ID NO: 180299 - DNA, 25 bp, Saccharomyces pastorianus
gtcgtcgctgatggtcttgtatcgg

SEQ ID NO: 180300 - DNA, 25 bp, Saccharomyces pastorianus
tatcggacccaagggaacgactggt

SEQ ID NO: 180301 - DNA, 25 bp, Saccharomyces pastorianus
gctgatggtcttgtatcggacccaa

SEQ ID NO: 180302 - DNA, 25 bp, Saccharomyces pastorianus
ggacccaagggaacgactggtactg

SEQ ID NO: 180303 - DNA, 25 bp, Saccharomyces pastorianus
atggtcttgtatcggacccaaggga

SEQ ID NO: 180304 - DNA, 25 bp, Saccharomyces pastorianus
gctatcatctattaactagtattta

SEQ ID NO: 180305 - DNA, 25 bp, Saccharomyces pastorianus
aatcagctatcatctattaactagt

SEQ ID NO: 180306 - DNA, 25 bp, Saccharomyces pastorianus
tcagctatcatctattaactagtat

SEQ ID NO: 180307 - DNA, 25 bp, Saccharomyces pastorianus
aaatcagctatcatctattaactag

SEQ ID NO: 180308 - DNA, 25 bp, Saccharomyces pastorianus
cagctatcatctattaactagtatt

SEQ ID NO: 180309 - DNA, 25 bp, Saccharomyces pastorianus
agctatcatctattaactagtattt

SEQ ID NO: 180310 - DNA, 25 bp, Saccharomyces pastorianus
caaatcagctatcatctattaacta

SEQ ID NO: 180311 - DNA, 25 bp, Saccharomyces pastorianus
atcagctatcatctattaactagta

SEQ ID NO: 180312 - DNA, 25 bp, Saccharomyces pastorianus
cccactagtcctgacgttgatgctg

SEQ ID NO: 180313 - DNA, 25 bp, Saccharomyces pastorianus
agtagcattagtcctgacgttgatg

SEQ ID NO: 180314 - DNA, 25 bp, Saccharomyces pastorianus
tagtcccactagtcctgacgttgat

SEQ ID NO: 180315 - DNA, 25 bp, Saccharomyces pastorianus
tagtgctggagttgatgctggcagt

SEQ ID NO: 180316 - DNA, 25 bp, Saccharomyces pastorianus
tgctggcagtggtagtcccactagt

SEQ ID NO: 180317 - DNA, 25 bp, Saccharomyces pastorianus
ttgatgctggcagtggtagtcccac

SEQ ID NO: 180318 - DNA, 25 bp, Saccharomyces pastorianus
agcattagtcctgacgttgatgctg

SEQ ID NO: 180319 - DNA, 25 bp, Saccharomyces pastorianus
gttgatgctggcagtggtagtccca

SEQ ID NO: 180320 - DNA, 25 bp, Saccharomyces pastorianus
gatgctggcagtggtagtcccacta

SEQ ID NO: 180321 - DNA, 25 bp, Saccharomyces pastorianus
ggcagtggtagtcccactagtcctg

SEQ ID NO: 180322 - DNA, 25 bp, Saccharomyces pastorianus
ttagtcctgacgttgatgctggcag

SEQ ID NO: 180323 - DNA, 25 bp, Saccharomyces pastorianus
accggcaagccatggttctacttga

SEQ ID NO: 180324 - DNA, 25 bp, Saccharomyces pastorianus
actttgtttgcagccttgaacttta

SEQ ID NO: 180325 - DNA, 25 bp, Saccharomyces pastorianus
ctctgtgctggctttctggaaggaa

SEQ ID NO: 180326 - DNA, 25 bp, Saccharomyces pastorianus
attgctctcatctccagagaccatg

SEQ ID NO: 180327 - DNA, 25 bp, Saccharomyces pastorianus
tatgattttgagttcatcgacctgg

SEQ ID NO: 180328 - DNA, 25 bp, Saccharomyces pastorianus
aaggatccaaactctgtgctggctt

SEQ ID NO: 180329 - DNA, 25 bp, Saccharomyces pastorianus
gataacagtacctcgttcaagttgg

SEQ ID NO: 180330 - DNA, 25 bp, Saccharomyces pastorianus
atggtcgcgcgaagagccaaatgct

SEQ ID NO: 180331 - DNA, 25 bp, Saccharomyces pastorianus
actttagctctgataacgtggactt

SEQ ID NO: 180332 - DNA, 25 bp, Saccharomyces pastorianus
tgtcactgaccggtactttgtatgt

SEQ ID NO: 180333 - DNA, 25 bp, Saccharomyces pastorianus
ggactttacgattccagataacagt

SEQ ID NO: 180334 - DNA, 25 bp, Saccharomyces pastorianus
aaaacgatactctgaagcaaagaat

SEQ ID NO: 180335 - DNA, 25 bp, Saccharomyces pastorianus
gcaaagaattcaacagctagtagaa

SEQ ID NO: 180336 - DNA, 25 bp, Saccharomyces pastorianus
tgaacagaaggatcatacaaccaaa

SEQ ID NO: 180337 - DNA, 25 bp, Saccharomyces pastorianus
gaattcaacagctagtagaaatcaa

SEQ ID NO: 180338 - DNA, 25 bp, Saccharomyces pastorianus
actggaggctttccaaaagaacaat

SEQ ID NO: 180339 - DNA, 25 bp, Saccharomyces pastorianus
tacaaccaaactggaggctttccaa

SEQ ID NO: 180340 - DNA, 25 bp, Saccharomyces pastorianus
gatcatacaaccaaactggaggctt

SEQ ID NO: 180341 - DNA, 25 bp, Saccharomyces pastorianus
ttcaacagctagtagaaatcaaaga

SEQ ID NO: 180342 - DNA, 25 bp, Saccharomyces pastorianus
atacaaccaaactggaggctttcca

SEQ ID NO: 180343 - DNA, 25 bp, Saccharomyces pastorianus
gatactctgaagcaaagaattcaac

SEQ ID NO: 180344 - DNA, 25 bp, Saccharomyces pastorianus
gaaggatcatacaaccaaactggag

SEQ ID NO: 180345 - DNA, 25 bp, Saccharomyces pastorianus
gctcgcaagataatatgcaaaacat

SEQ ID NO: 180346 - DNA, 25 bp, Saccharomyces pastorianus
aacatcacccaatcggtcgggatcc

SEQ ID NO: 180347 - DNA, 25 bp, Saccharomyces pastorianus
tgcaaaacatcacccaatcggtcgg

SEQ ID NO: 180348 - DNA, 25 bp, Saccharomyces pastorianus
aaacatcacccaatcggtcgggatc

SEQ ID NO: 180349 - DNA, 25 bp, Saccharomyces pastorianus
gcaaaacatcacccaatcggtcggg

SEQ ID NO: 180350 - DNA, 25 bp, Saccharomyces pastorianus
acccgccccgaaattgagtgcacat

SEQ ID NO: 180351 - DNA, 25 bp, Saccharomyces pastorianus
caaaacatcacccaatcggtcggga

SEQ ID NO: 180352 - DNA, 25 bp, Saccharomyces pastorianus
cgccccgaaattgagtgcacatgct

SEQ ID NO: 180353 - DNA, 25 bp, Saccharomyces pastorianus
ggacccgccccgaaattgagtgcac

SEQ ID NO: 180354 - DNA, 25 bp, Saccharomyces pastorianus
aaaacatcacccaatcggtcgggat

SEQ ID NO: 180355 - DNA, 25 bp, Saccharomyces pastorianus
atgctcgcaagataatatgcaaaac

SEQ ID NO: 180356 - DNA, 25 bp, Saccharomyces pastorianus
ttgctgcagctttaaatgatgctag

SEQ ID NO: 180357 - DNA, 25 bp, Saccharomyces pastorianus
gttcttgctgcagctttaaatgatg

SEQ ID NO: 180358 - DNA, 25 bp, Saccharomyces pastorianus
tcttgctgcagctttaaatgatgct

SEQ ID NO: 180359 - DNA, 25 bp, Saccharomyces pastorianus
gctgcagctttaaatgatgctagac

SEQ ID NO: 180360 - DNA, 25 bp, Saccharomyces pastorianus
caaagttcttgctgcagctttaaat

SEQ ID NO: 180361 - DNA, 25 bp, Saccharomyces pastorianus
gcaaagttcttgctgcagctttaaa

SEQ ID NO: 180362 - DNA, 25 bp, Saccharomyces pastorianus
gcagctttaaatgatgctagacgag

SEQ ID NO: 180363 - DNA, 25 bp, Saccharomyces pastorianus
gagtctgcaagtgaagaaagcaaag

SEQ ID NO: 180364 - DNA, 25 bp, Saccharomyces pastorianus
ctgcaagtgaagaaagcaaagttct

SEQ ID NO: 180365 - DNA, 25 bp, Saccharomyces pastorianus
aagttcttgctgcagctttaaatga

SEQ ID NO: 180366 - DNA, 25 bp, Saccharomyces pastorianus
agctttaaatgatgctagacgagac

SEQ ID NO: 180367 - DNA, 25 bp, Saccharomyces pastorianus
tcttttttgagctcttcctttgata

SEQ ID NO: 180368 - DNA, 25 bp, Saccharomyces pastorianus
aactggacacttaattctctctggt

SEQ ID NO: 180369 - DNA, 25 bp, Saccharomyces pastorianus
tcacctaagtagcattctggctctc

SEQ ID NO: 180370 - DNA, 25 bp, Saccharomyces pastorianus
caccttaattcaacgcctgcagatg

SEQ ID NO: 180371 - DNA, 25 bp, Saccharomyces pastorianus
agtgacacggctcaacattctatgc

SEQ ID NO: 180372 - DNA, 25 bp, Saccharomyces pastorianus
gcattacgattcaccgaagactgtc

SEQ ID NO: 180373 - DNA, 25 bp, Saccharomyces pastorianus
ggctctcaagtattttcccgatggt

SEQ ID NO: 180374 - DNA, 25 bp, Saccharomyces pastorianus
tttgggatttctaccatgactatga

SEQ ID NO: 180375 - DNA, 25 bp, Saccharomyces pastorianus
atgactatgaatgcctacgagattt

SEQ ID NO: 180376 - DNA, 25 bp, Saccharomyces pastorianus
gtgaaaaccaggttgcaccttaatt

SEQ ID NO: 180377 - DNA, 25 bp, Saccharomyces pastorianus
agatgttgaatctcggcccactaac

SEQ ID NO: 180378 - DNA, 25 bp, Saccharomyces pastorianus
gccagcggttcctagacaacgagtg

SEQ ID NO: 180379 - DNA, 25 bp, Saccharomyces pastorianus
actttggcctctatgatggcgtcta

SEQ ID NO: 180380 - DNA, 25 bp, Saccharomyces pastorianus
aactggttctgtacctcattttttg

SEQ ID NO: 180381 - DNA, 25 bp, Saccharomyces pastorianus
gattttctcttactttggcctctat

SEQ ID NO: 180382 - DNA, 25 bp, Saccharomyces pastorianus
ccatcaagctggtaggagacgagaa

SEQ ID NO: 180383 - DNA, 25 bp, Saccharomyces pastorianus
tgtacctcattttttgccagcggtt

SEQ ID NO: 180384 - DNA, 25 bp, Saccharomyces pastorianus
tcgccacggtggaaggattttctct

SEQ ID NO: 180385 - DNA, 25 bp, Saccharomyces pastorianus
gatggcgtctataaaaactggttct

SEQ ID NO: 180386 - DNA, 25 bp, Saccharomyces pastorianus
aatattggtatatctgcgtcagtcg

SEQ ID NO: 180387 - DNA, 25 bp, Saccharomyces pastorianus
gtatggccaagcgtatacttcagaa

SEQ ID NO: 180388 - DNA, 25 bp, Saccharomyces pastorianus
atctgcgtcagtcgccacggtggaa

SEQ ID NO: 180389 - DNA, 25 bp, Saccharomyces pastorianus
atatttcgtcattgccaagtggctg

SEQ ID NO: 180390 - DNA, 25 bp, Saccharomyces pastorianus
gaggaatatttcgtcattgccaagt

SEQ ID NO: 180391 - DNA, 25 bp, Saccharomyces pastorianus
aaagaacaacggctatttggtcgat

SEQ ID NO: 180392 - DNA, 25 bp, Saccharomyces pastorianus
aacaacggctatttggtcgatgaca

SEQ ID NO: 180393 - DNA, 25 bp, Saccharomyces pastorianus
tgccaaagctgaggaatatttcgtc

SEQ ID NO: 180394 - DNA, 25 bp, Saccharomyces pastorianus
gaatatttcgtcattgccaagtggc

SEQ ID NO: 180395 - DNA, 25 bp, Saccharomyces pastorianus
gatgacaaattgagcggtactgata

SEQ ID NO: 180396 - DNA, 25 bp, Saccharomyces pastorianus
aacggctatttggtcgatgacaaat

SEQ ID NO: 180397 - DNA, 25 bp, Saccharomyces pastorianus
caaattgagcggtactgatattcta

SEQ ID NO: 180398 - DNA, 25 bp, Saccharomyces pastorianus
tcgtcattgccaagtggctggaaac

SEQ ID NO: 180399 - DNA, 25 bp, Saccharomyces pastorianus
gagtcaattagattttctagagggt

SEQ ID NO: 180400 - DNA, 25 bp, Saccharomyces pastorianus
gaaagcgtcatacatgatggccgta

SEQ ID NO: 180401 - DNA, 25 bp, Saccharomyces pastorianus
acatgatggccgtagttccgtggat

SEQ ID NO: 180402 - DNA, 25 bp, Saccharomyces pastorianus
tagttccgtggatagttggtccgaa

SEQ ID NO: 180403 - DNA, 25 bp, Saccharomyces pastorianus
atgaatctgattttgtggaggcctt

SEQ ID NO: 180404 - DNA, 25 bp, Saccharomyces pastorianus
ggtccgaaaggaatgaatctgattt

SEQ ID NO: 180405 - DNA, 25 bp, Saccharomyces pastorianus
tgattttgtggaggccttggataaa

SEQ ID NO: 180406 - DNA, 25 bp, Saccharomyces pastorianus
gctatttggtattaaactggctaac

SEQ ID NO: 180407 - DNA, 25 bp, Saccharomyces pastorianus
gatggccgtagttccgtggatagtt

SEQ ID NO: 180408 - DNA, 25 bp, Saccharomyces pastorianus
taatgctgtcttgcgaaaattagat

SEQ ID NO: 180409 - DNA, 25 bp, Saccharomyces pastorianus
ccaaatataatgctgtcttgcgaaa

SEQ ID NO: 180410 - DNA, 25 bp, Saccharomyces pastorianus
gtatatcctccctggaaggattcat

SEQ ID NO: 180411 - DNA, 25 bp, Saccharomyces pastorianus
taagtttgcgactcatttaaccaag

SEQ ID NO: 180412 - DNA, 25 bp, Saccharomyces pastorianus
agtgttattgaacgcattgacttaa

SEQ ID NO: 180413 - DNA, 25 bp, Saccharomyces pastorianus
gctaatcactggtatttctctaaat

SEQ ID NO: 180414 - DNA, 25 bp, Saccharomyces pastorianus
gggaatccgcagaaaatactttatc

SEQ ID NO: 180415 - DNA, 25 bp, Saccharomyces pastorianus
gaatctcaccgaagaatcacctcat

SEQ ID NO: 180416 - DNA, 25 bp, Saccharomyces pastorianus
ccaattctcttactccggcaaattt

SEQ ID NO: 180417 - DNA, 25 bp, Saccharomyces pastorianus
tggacatcactctcaaaccgttgga

SEQ ID NO: 180418 - DNA, 25 bp, Saccharomyces pastorianus
gttcaatctgcaaacagcacaggat

SEQ ID NO: 180419 - DNA, 25 bp, Saccharomyces pastorianus
gatttcaaaactttggcagccgtta

SEQ ID NO: 180420 - DNA, 25 bp, Saccharomyces pastorianus
aatacaggtgttacgaatccagata

SEQ ID NO: 180421 - DNA, 25 bp, Saccharomyces pastorianus
caaatatatgcttttcccttttgat

SEQ ID NO: 180422 - DNA, 25 bp, Saccharomyces pastorianus
gatattgtcgctgatgctattttcc

SEQ ID NO: 180423 - DNA, 25 bp, Saccharomyces pastorianus
ttcagtgctcaattattccaagttt

SEQ ID NO: 180424 - DNA, 25 bp, Saccharomyces pastorianus
tcacggataccccaaggcaagttat

SEQ ID NO: 180425 - DNA, 25 bp, Saccharomyces pastorianus
attgtgctattgatatgggaggcta

SEQ ID NO: 180426 - DNA, 25 bp, Saccharomyces pastorianus
tctggaatcatttaccggtttgatc

SEQ ID NO: 180427 - DNA, 25 bp, Saccharomyces pastorianus
acgggaaatatctctttgacttatg

SEQ ID NO: 180428 - DNA, 25 bp, Saccharomyces pastorianus
tgtggtcagttctcgtaacagtaaa

SEQ ID NO: 180429 - DNA, 25 bp, Saccharomyces pastorianus
gcggttgtattttagcatcgattgt

SEQ ID NO: 180430 - DNA, 25 bp, Saccharomyces pastorianus
gctattttcctttataatctgggca

SEQ ID NO: 180431 - DNA, 25 bp, Saccharomyces pastorianus
gattaatcttcacggataccccaag

SEQ ID NO: 180432 - DNA, 25 bp, Saccharomyces pastorianus
attaatggtcttacgctgtggtcag

SEQ ID NO: 180433 - DNA, 25 bp, Saccharomyces pastorianus
tcgctattgtccaaggttgcgcaat

SEQ ID NO: 180434 - DNA, 25 bp, Saccharomyces pastorianus
caaggttgcgcaatctacggaaact

SEQ ID NO: 180435 - DNA, 25 bp, Saccharomyces pastorianus
ttgcgcaatctacggaaacttccaa

SEQ ID NO: 180436 - DNA, 25 bp, Saccharomyces pastorianus
ttgtccaaggttgcgcaatctacgg

SEQ ID NO: 180437 - DNA, 25 bp, Saccharomyces pastorianus
aagcagtcagactggcagctctgaa

SEQ ID NO: 180438 - DNA, 25 bp, Saccharomyces pastorianus
ggaaacttccaaagcagtcagactg

SEQ ID NO: 180439 - DNA, 25 bp, Saccharomyces pastorianus
taatcgctattgtccaaggttgcgc

SEQ ID NO: 180440 - DNA, 25 bp, Saccharomyces pastorianus
tcagactggcagctctgaatgctct

SEQ ID NO: 180441 - DNA, 25 bp, Saccharomyces pastorianus
ggttgcgcaatctacggaaacttcc

SEQ ID NO: 180442 - DNA, 25 bp, Saccharomyces pastorianus
atcttaatcgctattgtccaaggtt

SEQ ID NO: 180443 - DNA, 25 bp, Saccharomyces pastorianus
gctattgtccaaggttgcgcaatct

SEQ ID NO: 180444 - DNA, 25 bp, Saccharomyces pastorianus
acaactgcgtagtgatatgctgcta

SEQ ID NO: 180445 - DNA, 25 bp, Saccharomyces pastorianus
ggtctactgcactgctggctaagat

SEQ ID NO: 180446 - DNA, 25 bp, Saccharomyces pastorianus
agacatgggtctcaggtctactgca

SEQ ID NO: 180447 - DNA, 25 bp, Saccharomyces pastorianus
ttggtaaggcctacagcaagatcaa

SEQ ID NO: 180448 - DNA, 25 bp, Saccharomyces pastorianus
attcaccacttgaagatcggcccat

SEQ ID NO: 180449 - DNA, 25 bp, Saccharomyces pastorianus
tatgccttcaatcccatggacagct

SEQ ID NO: 180450 - DNA, 25 bp, Saccharomyces pastorianus
tcatgatctttccaacattccacag

SEQ ID NO: 180451 - DNA, 25 bp, Saccharomyces pastorianus
ggacagcttcataccatattacgac

SEQ ID NO: 180452 - DNA, 25 bp, Saccharomyces pastorianus
tttacggatctaattcaccacttga

SEQ ID NO: 180453 - DNA, 25 bp, Saccharomyces pastorianus
gcaagatcaaagaccacgccagaag

SEQ ID NO: 180454 - DNA, 25 bp, Saccharomyces pastorianus
attgattgtttcatctatgccttca

SEQ ID NO: 180455 - DNA, 25 bp, Saccharomyces pastorianus
gatttcgttgttgtcaaaggctata

SEQ ID NO: 180456 - DNA, 25 bp, Saccharomyces pastorianus
atttcgttgttgtcaaaggctataa

SEQ ID NO: 180457 - DNA, 25 bp, Saccharomyces pastorianus
gtataccagaaagtttcctcgagga

SEQ ID NO: 180458 - DNA, 25 bp, Saccharomyces pastorianus
cctcgaggatatagaaattcacaaa

SEQ ID NO: 180459 - DNA, 25 bp, Saccharomyces pastorianus
gaattatgaaatactttttgggatt

SEQ ID NO: 180460 - DNA, 25 bp, Saccharomyces pastorianus
ggatttcgttgttgtcaaaggctat

SEQ ID NO: 180461 - DNA, 25 bp, Saccharomyces pastorianus
aagtataccagaaagtttcctcgag

SEQ ID NO: 180462 - DNA, 25 bp, Saccharomyces pastorianus
gttgttgtcaaaggctataaaattt

SEQ ID NO: 180463 - DNA, 25 bp, Saccharomyces pastorianus
ttcgttgttgtcaaaggctataaaa

SEQ ID NO: 180464 - DNA, 25 bp, Saccharomyces pastorianus
caaagtataccagaaagtttcctcg

SEQ ID NO: 180465 - DNA, 25 bp, Saccharomyces pastorianus
tatgaaatactttttgggatttcgt

SEQ ID NO: 180466 - DNA, 25 bp, Saccharomyces pastorianus
ttggcctacaaagctggtatcaaaa

SEQ ID NO: 180467 - DNA, 25 bp, Saccharomyces pastorianus
gtccagcaagagaaatcgcaagatt

SEQ ID NO: 180468 - DNA, 25 bp, Saccharomyces pastorianus
agacatgagcattatttggcctaca

SEQ ID NO: 180469 - DNA, 25 bp, Saccharomyces pastorianus
gatttggttcttgatgtcggttgcg

SEQ ID NO: 180470 - DNA, 25 bp, Saccharomyces pastorianus
ttcttctttccatttcagtagattc

SEQ ID NO: 180471 - DNA, 25 bp, Saccharomyces pastorianus
cagtagattctacaagggcgagagt

SEQ ID NO: 180472 - DNA, 25 bp, Saccharomyces pastorianus
gttacagacttctacgaatacggtt

SEQ ID NO: 180473 - DNA, 25 bp, Saccharomyces pastorianus
acgattatcaaattgccaaagccaa

SEQ ID NO: 180474 - DNA, 25 bp, Saccharomyces pastorianus
attcactggctgtaacgtcatcggt

SEQ ID NO: 180475 - DNA, 25 bp, Saccharomyces pastorianus
agggcgagagttttgctgcctcgat

SEQ ID NO: 180476 - DNA, 25 bp, Saccharomyces pastorianus
aaatcgcaagattcactggctgtaa

SEQ ID NO: 180477 - DNA, 25 bp, Saccharomyces pastorianus
acgttagactgaaggccaagcaatt

SEQ ID NO: 180478 - DNA, 25 bp, Saccharomyces pastorianus
tggacgagatatgctacggacttat

SEQ ID NO: 180479 - DNA, 25 bp, Saccharomyces pastorianus
aattactggcaacacgtaacttcca

SEQ ID NO: 180480 - DNA, 25 bp, Saccharomyces pastorianus
gattccacactgctgaagtgggaaa

SEQ ID NO: 180481 - DNA, 25 bp, Saccharomyces pastorianus
aatttcatcattacaatgcccggtg

SEQ ID NO: 180482 - DNA, 25 bp, Saccharomyces pastorianus
atacccgcatcttcaagtttctgtg

SEQ ID NO: 180483 - DNA, 25 bp, Saccharomyces pastorianus
gcgaatttccacaaacgttagactg

SEQ ID NO: 180484 - DNA, 25 bp, Saccharomyces pastorianus
taactgttttctgcccatgagtaaa

SEQ ID NO: 180485 - DNA, 25 bp, Saccharomyces pastorianus
tctgcagaaacacgatgaatccttt

SEQ ID NO: 180486 - DNA, 25 bp, Saccharomyces pastorianus
cttccagaagtgtctattaagcctt

SEQ ID NO: 180487 - DNA, 25 bp, Saccharomyces pastorianus
gaggcaaacctcgtaactgttttct

SEQ ID NO: 180488 - DNA, 25 bp, Saccharomyces pastorianus
ccagcgatttcgtatgtgttttgaa

SEQ ID NO: 180489 - DNA, 25 bp, Saccharomyces pastorianus
gaaaataacgtggtgattccagtaa

SEQ ID NO: 180490 - DNA, 25 bp, Saccharomyces pastorianus
gaaccagcaaataactcacaagatg

SEQ ID NO: 180491 - DNA, 25 bp, Saccharomyces pastorianus
gctccggaagcctttagtgggaaag

SEQ ID NO: 180492 - DNA, 25 bp, Saccharomyces pastorianus
ttccgaatgttgaagaaccagcaaa

SEQ ID NO: 180493 - DNA, 25 bp, Saccharomyces pastorianus
tcgcaggactttgagcaagctatag

SEQ ID NO: 180494 - DNA, 25 bp, Saccharomyces pastorianus
gatgagctaaactcgcaggactttg

SEQ ID NO: 180495 - DNA, 25 bp, Saccharomyces pastorianus
tggaagaaccgcaggctccggaagc

SEQ ID NO: 180496 - DNA, 25 bp, Saccharomyces pastorianus
gtgggaaagtccagcgatttcgtat

SEQ ID NO: 180497 - DNA, 25 bp, Saccharomyces pastorianus
agctataggaatgccatcagaaccc

SEQ ID NO: 180498 - DNA, 25 bp, Saccharomyces pastorianus
gctacactactcttccgaatgttga

SEQ ID NO: 180499 - DNA, 25 bp, Saccharomyces pastorianus
gatagcccctctaataatccattta

SEQ ID NO: 180500 - DNA, 25 bp, Saccharomyces pastorianus
tgagctcatcattttcatctgttga

SEQ ID NO: 180501 - DNA, 25 bp, Saccharomyces pastorianus
ttgatttatcaactccaccgccttt

SEQ ID NO: 180502 - DNA, 25 bp, Saccharomyces pastorianus
tttagactaccaaagggctcagttt

SEQ ID NO: 180503 - DNA, 25 bp, Saccharomyces pastorianus
gaagttgccgttatcaggagattca

SEQ ID NO: 180504 - DNA, 25 bp, Saccharomyces pastorianus
gtctccctcggtgatacatagtaat

SEQ ID NO: 180505 - DNA, 25 bp, Saccharomyces pastorianus
accgcctttggatgctatgtctata

SEQ ID NO: 180506 - DNA, 25 bp, Saccharomyces pastorianus
gaacatttcgtagcagatagcccct

SEQ ID NO: 180507 - DNA, 25 bp, Saccharomyces pastorianus
taattctgtcgggtctatgtcgtct

SEQ ID NO: 180508 - DNA, 25 bp, Saccharomyces pastorianus
tatgtctatacaatcgtctccctcg

SEQ ID NO: 180509 - DNA, 25 bp, Saccharomyces pastorianus
actgatgaggccttgggctgcattt

SEQ ID NO: 180510 - DNA, 25 bp, Saccharomyces pastorianus
tccccgcgttattagcacggtgcct

SEQ ID NO: 180511 - DNA, 25 bp, Saccharomyces pastorianus
gaaccgctgatccccgcgttattag

SEQ ID NO: 180512 - DNA, 25 bp, Saccharomyces pastorianus
cccgcgttattagcacggtgcctta

SEQ ID NO: 180513 - DNA, 25 bp, Saccharomyces pastorianus
ccccgcgttattagcacggtgcctt

SEQ ID NO: 180514 - DNA, 25 bp, Saccharomyces pastorianus
aaccgctgatccccgcgttattagc

SEQ ID NO: 180515 - DNA, 25 bp, Saccharomyces pastorianus
accgctgatccccgcgttattagca

SEQ ID NO: 180516 - DNA, 25 bp, Saccharomyces pastorianus
atccccgcgttattagcacggtgcc

SEQ ID NO: 180517 - DNA, 25 bp, Saccharomyces pastorianus
gatccccgcgttattagcacggtgc

SEQ ID NO: 180518 - DNA, 25 bp, Saccharomyces pastorianus
tgatccccgcgttattagcacggtg

SEQ ID NO: 180519 - DNA, 25 bp, Saccharomyces pastorianus
ctgatccccgcgttattagcacggt

SEQ ID NO: 180520 - DNA, 25 bp, Saccharomyces pastorianus
gctgatccccgcgttattagcacgg

SEQ ID NO: 180521 - DNA, 25 bp, Saccharomyces pastorianus
ttcgtacgactttttcagccaacct

SEQ ID NO: 180522 - DNA, 25 bp, Saccharomyces pastorianus
ccaacctgatttcaacagaaatttc

SEQ ID NO: 180523 - DNA, 25 bp, Saccharomyces pastorianus
ttcctagacaatgggcaaagcttaa

SEQ ID NO: 180524 - DNA, 25 bp, Saccharomyces pastorianus
atttcctagacaatgggcaaagctt

SEQ ID NO: 180525 - DNA, 25 bp, Saccharomyces pastorianus
gtacgactttttcagccaacctgat

SEQ ID NO: 180526 - DNA, 25 bp, Saccharomyces pastorianus
gactttttcagccaacctgatttca

SEQ ID NO: 180527 - DNA, 25 bp, Saccharomyces pastorianus
aacagaaatttcctagacaatgggc

SEQ ID NO: 180528 - DNA, 25 bp, Saccharomyces pastorianus
gaaatttcctagacaatgggcaaag

SEQ ID NO: 180529 - DNA, 25 bp, Saccharomyces pastorianus
cagaaatttcctagacaatgggcaa

SEQ ID NO: 180530 - DNA, 25 bp, Saccharomyces pastorianus
tcgtacgactttttcagccaacctg

SEQ ID NO: 180531 - DNA, 25 bp, Saccharomyces pastorianus
acgactttttcagccaacctgattt

SEQ ID NO: 180532 - DNA, 25 bp, Saccharomyces pastorianus
aatgtgatgttgagtccttccttgt

SEQ ID NO: 180533 - DNA, 25 bp, Saccharomyces pastorianus
taatagaattgctcgtgtaactggt

SEQ ID NO: 180534 - DNA, 25 bp, Saccharomyces pastorianus
aggtggtgatcctattagactccta

SEQ ID NO: 180535 - DNA, 25 bp, Saccharomyces pastorianus
ggtgtttcagatctagcacagcatt

SEQ ID NO: 180536 - DNA, 25 bp, Saccharomyces pastorianus
agggatccagcaatggccataccaa

SEQ ID NO: 180537 - DNA, 25 bp, Saccharomyces pastorianus
ggagtgtattccacgtactttgata

SEQ ID NO: 180538 - DNA, 25 bp, Saccharomyces pastorianus
ccaccgagatggcagtttctgtcaa

SEQ ID NO: 180539 - DNA, 25 bp, Saccharomyces pastorianus
gtgatgtcggtacaaactgtggatt

SEQ ID NO: 180540 - DNA, 25 bp, Saccharomyces pastorianus
gttaggccaacactagtcatcactg

SEQ ID NO: 180541 - DNA, 25 bp, Saccharomyces pastorianus
tgaacaaattttagccgttaggcca

SEQ ID NO: 180542 - DNA, 25 bp, Saccharomyces pastorianus
gatcgtaacctacaagatgctatgg

SEQ ID NO: 180543 - DNA, 25 bp, Saccharomyces pastorianus
gatgaaaccgacactctgagttccg

SEQ ID NO: 180544 - DNA, 25 bp, Saccharomyces pastorianus
gaggaaagtacagccgccgagatgc

SEQ ID NO: 180545 - DNA, 25 bp, Saccharomyces pastorianus
gagtgcgtcaatcgtgttcagcaaa

SEQ ID NO: 180546 - DNA, 25 bp, Saccharomyces pastorianus
acctggtgtacttggagtcgtgttt

SEQ ID NO: 180547 - DNA, 25 bp, Saccharomyces pastorianus
ttggttaattcctccataatgacag

SEQ ID NO: 180548 - DNA, 25 bp, Saccharomyces pastorianus
ttgccgaatgatcagtggtcagctt

SEQ ID NO: 180549 - DNA, 25 bp, Saccharomyces pastorianus
atcaggtacattccattgacttgaa

SEQ ID NO: 180550 - DNA, 25 bp, Saccharomyces pastorianus
gagttccgtcattcatcaggtacat

SEQ ID NO: 180551 - DNA, 25 bp, Saccharomyces pastorianus
gcagccggtgattagtaattgccga

SEQ ID NO: 180552 - DNA, 25 bp, Saccharomyces pastorianus
gaaacgtatcaagtagccaagacct

SEQ ID NO: 180553 - DNA, 25 bp, Saccharomyces pastorianus
tgggatgaaacttacgacctggtgt

SEQ ID NO: 180554 - DNA, 25 bp, Saccharomyces pastorianus
aaacagtcagtttctctggagagca

SEQ ID NO: 180555 - DNA, 25 bp, Saccharomyces pastorianus
gggctagagataatccctcgaaacc

SEQ ID NO: 180556 - DNA, 25 bp, Saccharomyces pastorianus
ttcggacccaaatgcatcaacagta

SEQ ID NO: 180557 - DNA, 25 bp, Saccharomyces pastorianus
gagcatatacacttcttgggctaga

SEQ ID NO: 180558 - DNA, 25 bp, Saccharomyces pastorianus
aagtcacaatttacagtccttcgga

SEQ ID NO: 180559 - DNA, 25 bp, Saccharomyces pastorianus
atatctgaacgacaaccaacgggaa

SEQ ID NO: 180560 - DNA, 25 bp, Saccharomyces pastorianus
ttctctggagagcagctattactct

SEQ ID NO: 180561 - DNA, 25 bp, Saccharomyces pastorianus
cgagctcaaagaaatctgtcattgt

SEQ ID NO: 180562 - DNA, 25 bp, Saccharomyces pastorianus
gaaaagctacgttctttattgtcag

SEQ ID NO: 180563 - DNA, 25 bp, Saccharomyces pastorianus
gccgatatattcattaacgagctca

SEQ ID NO: 180564 - DNA, 25 bp, Saccharomyces pastorianus
ctcgaaaccggatattgccgatata

SEQ ID NO: 180565 - DNA, 25 bp, Saccharomyces pastorianus
ggtttcttcttcttgtttactctca

SEQ ID NO: 180566 - DNA, 25 bp, Saccharomyces pastorianus
attgctaattcctcatcgtcgctat

SEQ ID NO: 180567 - DNA, 25 bp, Saccharomyces pastorianus
tggactcgccctctgctagaaagtt

SEQ ID NO: 180568 - DNA, 25 bp, Saccharomyces pastorianus
gtttactctcaatatgggccatttt

SEQ ID NO: 180569 - DNA, 25 bp, Saccharomyces pastorianus
gaagtggtatcatcggcgtccaaat

SEQ ID NO: 180570 - DNA, 25 bp, Saccharomyces pastorianus
agcccaccttttcttctaataatct

SEQ ID NO: 180571 - DNA, 25 bp, Saccharomyces pastorianus
aatcttatccaagtcaacgtccttc

SEQ ID NO: 180572 - DNA, 25 bp, Saccharomyces pastorianus
tcgtcgctatcgttttctttttcta

SEQ ID NO: 180573 - DNA, 25 bp, Saccharomyces pastorianus
atcttcctcttcattcttggcggga

SEQ ID NO: 180574 - DNA, 25 bp, Saccharomyces pastorianus
aaaagcttcggcatcgtccttattg

SEQ ID NO: 180575 - DNA, 25 bp, Saccharomyces pastorianus
aacgtccttcttcacaaaagcttcg

SEQ ID NO: 180576 - DNA, 25 bp, Saccharomyces pastorianus
aagactccttacaataggtgtgcca

SEQ ID NO: 180577 - DNA, 25 bp, Saccharomyces pastorianus
aaacaaagtcagtgaaagtacgcat

SEQ ID NO: 180578 - DNA, 25 bp, Saccharomyces pastorianus
caataggtgtgccagaaacaaagtc

SEQ ID NO: 180579 - DNA, 25 bp, Saccharomyces pastorianus
taggtgtgccagaaacaaagtcagt

SEQ ID NO: 180580 - DNA, 25 bp, Saccharomyces pastorianus
ctccttacaataggtgtgccagaaa

SEQ ID NO: 180581 - DNA, 25 bp, Saccharomyces pastorianus
gactccttacaataggtgtgccaga

SEQ ID NO: 180582 - DNA, 25 bp, Saccharomyces pastorianus
tccttacaataggtgtgccagaaac

SEQ ID NO: 180583 - DNA, 25 bp, Saccharomyces pastorianus
cttacaataggtgtgccagaaacaa

SEQ ID NO: 180584 - DNA, 25 bp, Saccharomyces pastorianus
tgcaggtctctgaagactccttaca

SEQ ID NO: 180585 - DNA, 25 bp, Saccharomyces pastorianus
tgaagactccttacaataggtgtgc

SEQ ID NO: 180586 - DNA, 25 bp, Saccharomyces pastorianus
agactccttacaataggtgtgccag

SEQ ID NO: 180587 - DNA, 25 bp, Saccharomyces pastorianus
aaacttgaatggtcctcctctttgc

SEQ ID NO: 180588 - DNA, 25 bp, Saccharomyces pastorianus
gtcctcctctttgcaggcagctggt

SEQ ID NO: 180589 - DNA, 25 bp, Saccharomyces pastorianus
acttgaatggtcctcctctttgcag

SEQ ID NO: 180590 - DNA, 25 bp, Saccharomyces pastorianus
tggtgcatggagcttattaaacatt

SEQ ID NO: 180591 - DNA, 25 bp, Saccharomyces pastorianus
tggagcttattaaacattgttctgt

SEQ ID NO: 180592 - DNA, 25 bp, Saccharomyces pastorianus
attaaacattgttctgtggttgttc

SEQ ID NO: 180593 - DNA, 25 bp, Saccharomyces pastorianus
ggaaacttgaatggtcctcctcttt

SEQ ID NO: 180594 - DNA, 25 bp, Saccharomyces pastorianus
ttttgggcttaatatttggtattag

SEQ ID NO: 180595 - DNA, 25 bp, Saccharomyces pastorianus
atggtcctcctctttgcaggcagct

SEQ ID NO: 180596 - DNA, 25 bp, Saccharomyces pastorianus
ttgaatggtcctcctctttgcaggc

SEQ ID NO: 180597 - DNA, 25 bp, Saccharomyces pastorianus
gaatggtcctcctctttgcaggcag

SEQ ID NO: 180598 - DNA, 25 bp, Saccharomyces pastorianus
gttggcgtctgcaaatttgtgaatt

SEQ ID NO: 180599 - DNA, 25 bp, Saccharomyces pastorianus
tatactgttggcgtctgcaaatttg

SEQ ID NO: 180600 - DNA, 25 bp, Saccharomyces pastorianus
actgttggcgtctgcaaatttgtga

SEQ ID NO: 180601 - DNA, 25 bp, Saccharomyces pastorianus
aatttgtgaattctccgcgaatgcc

SEQ ID NO: 180602 - DNA, 25 bp, Saccharomyces pastorianus
ctgttggcgtctgcaaatttgtgaa

SEQ ID NO: 180603 - DNA, 25 bp, Saccharomyces pastorianus
gcaaatttgtgaattctccgcgaat

SEQ ID NO: 180604 - DNA, 25 bp, Saccharomyces pastorianus
ggcgtctgcaaatttgtgaattctc

SEQ ID NO: 180605 - DNA, 25 bp, Saccharomyces pastorianus
gtctgcaaatttgtgaattctccgc

SEQ ID NO: 180606 - DNA, 25 bp, Saccharomyces pastorianus
ctgcaaatttgtgaattctccgcga

SEQ ID NO: 180607 - DNA, 25 bp, Saccharomyces pastorianus
atactgttggcgtctgcaaatttgt

SEQ ID NO: 180608 - DNA, 25 bp, Saccharomyces pastorianus
aaatttgtgaattctccgcgaatgc

SEQ ID NO: 180609 - DNA, 25 bp, Saccharomyces pastorianus
ggaaacaatcagctctgtccacaac

SEQ ID NO: 180610 - DNA, 25 bp, Saccharomyces pastorianus
attgctccaggttatatcgctctaa

SEQ ID NO: 180611 - DNA, 25 bp, Saccharomyces pastorianus
tggtttccactattgacgctgagaa

SEQ ID NO: 180612 - DNA, 25 bp, Saccharomyces pastorianus
tatactgtggcggtgagaactttaa

SEQ ID NO: 180613 - DNA, 25 bp, Saccharomyces pastorianus
acaacatcctactgcccaatattat

SEQ ID NO: 180614 - DNA, 25 bp, Saccharomyces pastorianus
gtacaatttcagtaatcccgcctac

SEQ ID NO: 180615 - DNA, 25 bp, Saccharomyces pastorianus
taaaaccctctgctttggtcgataa

SEQ ID NO: 180616 - DNA, 25 bp, Saccharomyces pastorianus
ccctcacgaggttctgtacaatttc

SEQ ID NO: 180617 - DNA, 25 bp, Saccharomyces pastorianus
tcttcgtctcttctttatactgtgg

SEQ ID NO: 180618 - DNA, 25 bp, Saccharomyces pastorianus
gtttgtccagtactccagtagacca

SEQ ID NO: 180619 - DNA, 25 bp, Saccharomyces pastorianus
tcgaatgcggcaaacgtctgcagaa

SEQ ID NO: 180620 - DNA, 25 bp, Saccharomyces pastorianus
gagaatctttatatcccaactgcag

SEQ ID NO: 180621 - DNA, 25 bp, Saccharomyces pastorianus
gattgtgggccctgacatcatgaat

SEQ ID NO: 180622 - DNA, 25 bp, Saccharomyces pastorianus
tataccagcgctatcctacatatgt

SEQ ID NO: 180623 - DNA, 25 bp, Saccharomyces pastorianus
aattgatagcactcgggttgacact

SEQ ID NO: 180624 - DNA, 25 bp, Saccharomyces pastorianus
cggacgatcctttgctattatcagc

SEQ ID NO: 180625 - DNA, 25 bp, Saccharomyces pastorianus
gatggctttcatcagctcgttagat

SEQ ID NO: 180626 - DNA, 25 bp, Saccharomyces pastorianus
acagattttctacgatggctttcat

SEQ ID NO: 180627 - DNA, 25 bp, Saccharomyces pastorianus
ggagtctcaccagatttctttaagc

SEQ ID NO: 180628 - DNA, 25 bp, Saccharomyces pastorianus
atgacatgcaaagcctgctaacttt

SEQ ID NO: 180629 - DNA, 25 bp, Saccharomyces pastorianus
taaagtgttcagttcggacgatcct

SEQ ID NO: 180630 - DNA, 25 bp, Saccharomyces pastorianus
gggttgacactactgcatgacatgc

SEQ ID NO: 180631 - DNA, 25 bp, Saccharomyces pastorianus
gaccccatcgttgtgctatttggaa

SEQ ID NO: 180632 - DNA, 25 bp, Saccharomyces pastorianus
gactatttcatttattcggctttca

SEQ ID NO: 180633 - DNA, 25 bp, Saccharomyces pastorianus
aaatcagtatgctctcgctgtgctg

SEQ ID NO: 180634 - DNA, 25 bp, Saccharomyces pastorianus
gatagagtccgatgttgccatagat

SEQ ID NO: 180635 - DNA, 25 bp, Saccharomyces pastorianus
taatattgtcttttccggcgtactt

SEQ ID NO: 180636 - DNA, 25 bp, Saccharomyces pastorianus
aacggacgatgacctccttgaaagc

SEQ ID NO: 180637 - DNA, 25 bp, Saccharomyces pastorianus
taaacgcacttctcagtctgatggt

SEQ ID NO: 180638 - DNA, 25 bp, Saccharomyces pastorianus
agcactgcatttactaccttgactt

SEQ ID NO: 180639 - DNA, 25 bp, Saccharomyces pastorianus
tagtgggcctcttgaaacggacgat

SEQ ID NO: 180640 - DNA, 25 bp, Saccharomyces pastorianus
ttcggctttcaactaaacgcacttc

SEQ ID NO: 180641 - DNA, 25 bp, Saccharomyces pastorianus
agcgactttctttttcggagcttat

SEQ ID NO: 180642 - DNA, 25 bp, Saccharomyces pastorianus
agtggcaccgtaagctcgtcaattg

SEQ ID NO: 180643 - DNA, 25 bp, Saccharomyces pastorianus
ttgcaacagcgactttatttttaag

SEQ ID NO: 180644 - DNA, 25 bp, Saccharomyces pastorianus
gccgcggtcattttgttagtatctc

SEQ ID NO: 180645 - DNA, 25 bp, Saccharomyces pastorianus
ttatttttaagagccgcggtcattt

SEQ ID NO: 180646 - DNA, 25 bp, Saccharomyces pastorianus
cagcgactttatttttaagagccgc

SEQ ID NO: 180647 - DNA, 25 bp, Saccharomyces pastorianus
aattgcaacagcgactttattttta

SEQ ID NO: 180648 - DNA, 25 bp, Saccharomyces pastorianus
attgcaacagcgactttatttttaa

SEQ ID NO: 180649 - DNA, 25 bp, Saccharomyces pastorianus
gatcatccacataagtggcaccgta

SEQ ID NO: 180650 - DNA, 25 bp, Saccharomyces pastorianus
ataagtggcaccgtaagctcgtcaa

SEQ ID NO: 180651 - DNA, 25 bp, Saccharomyces pastorianus
cacataagtggcaccgtaagctcgt

SEQ ID NO: 180652 - DNA, 25 bp, Saccharomyces pastorianus
ggcaccgtaagctcgtcaattgcaa

SEQ ID NO: 180653 - DNA, 25 bp, Saccharomyces pastorianus
ttatagccttaatcacaatggaatc

SEQ ID NO: 180654 - DNA, 25 bp, Saccharomyces pastorianus
aatattatagccttaatcacaatgg

SEQ ID NO: 180655 - DNA, 25 bp, Saccharomyces pastorianus
tctagtacattctacatacctaata

SEQ ID NO: 180656 - DNA, 25 bp, Saccharomyces pastorianus
tatagccttaatcacaatggaatcc

SEQ ID NO: 180657 - DNA, 25 bp, Saccharomyces pastorianus
ccttaatcacaatggaatcccaaca

SEQ ID NO: 180658 - DNA, 25 bp, Saccharomyces pastorianus
gccttaatcacaatggaatcccaac

SEQ ID NO: 180659 - DNA, 25 bp, Saccharomyces pastorianus
cttaatcacaatggaatcccaacaa

SEQ ID NO: 180660 - DNA, 25 bp, Saccharomyces pastorianus
atagccttaatcacaatggaatccc

SEQ ID NO: 180661 - DNA, 25 bp, Saccharomyces pastorianus
agccttaatcacaatggaatcccaa

SEQ ID NO: 180662 - DNA, 25 bp, Saccharomyces pastorianus
aacttctagtacattctacatacct

SEQ ID NO: 180663 - DNA, 25 bp, Saccharomyces pastorianus
acaattacatcaaaattcacccaat

SEQ ID NO: 180664 - DNA, 25 bp, Saccharomyces pastorianus
ttcaatttcagcaacaacaacaaca

SEQ ID NO: 180665 - DNA, 25 bp, Saccharomyces pastorianus
tcagcaacaacaacaacagcaacaa

SEQ ID NO: 180666 - DNA, 25 bp, Saccharomyces pastorianus
atttcagcaacaacaacaacagcaa

SEQ ID NO: 180667 - DNA, 25 bp, Saccharomyces pastorianus
caatttcagcaacaacaacaacagc

SEQ ID NO: 180668 - DNA, 25 bp, Saccharomyces pastorianus
tttcagcaacaacaacaacagcaac

SEQ ID NO: 180669 - DNA, 25 bp, Saccharomyces pastorianus
aatttcagcaacaacaacaacagca

SEQ ID NO: 180670 - DNA, 25 bp, Saccharomyces pastorianus
ttcagcaacaacaacaacagcaaca

SEQ ID NO: 180671 - DNA, 25 bp, Saccharomyces pastorianus
tcaatttcagcaacaacaacaacag

SEQ ID NO: 180672 - DNA, 25 bp, Saccharomyces pastorianus
aaatcgtctgccactgtctttgggt

SEQ ID NO: 180673 - DNA, 25 bp, Saccharomyces pastorianus
agtaggtctgacctgccatattcca

SEQ ID NO: 180674 - DNA, 25 bp, Saccharomyces pastorianus
atctacgtccgcatgaagtcgatct

SEQ ID NO: 180675 - DNA, 25 bp, Saccharomyces pastorianus
gtacatgtcgtgctccaaatcgtct

SEQ ID NO: 180676 - DNA, 25 bp, Saccharomyces pastorianus
gagctttctaccgttggcgtacatg

SEQ ID NO: 180677 - DNA, 25 bp, Saccharomyces pastorianus
aggtacttcatcattccattagcaa

SEQ ID NO: 180678 - DNA, 25 bp, Saccharomyces pastorianus
ggttctccggtataatgtcgtttat

SEQ ID NO: 180679 - DNA, 25 bp, Saccharomyces pastorianus
gtatcttcaaacactctgctacgtt

SEQ ID NO: 180680 - DNA, 25 bp, Saccharomyces pastorianus
gctacgttggattttgatttcggca

SEQ ID NO: 180681 - DNA, 25 bp, Saccharomyces pastorianus
gccttgatcttaacatctgcatggt

SEQ ID NO: 180682 - DNA, 25 bp, Saccharomyces pastorianus
gtcgtttattttcttgcttactggg

SEQ ID NO: 180683 - DNA, 25 bp, Saccharomyces pastorianus
ttggcacgtgtccatctgcatacta

SEQ ID NO: 180684 - DNA, 25 bp, Saccharomyces pastorianus
ttttccctacgatccattcaaggtg

SEQ ID NO: 180685 - DNA, 25 bp, Saccharomyces pastorianus
aattccgagcctatgggaagctgta

SEQ ID NO: 180686 - DNA, 25 bp, Saccharomyces pastorianus
gatctcaatgtcatcagctgcctga

SEQ ID NO: 180687 - DNA, 25 bp, Saccharomyces pastorianus
caacgctttcgggttcgtatcaaat

SEQ ID NO: 180688 - DNA, 25 bp, Saccharomyces pastorianus
cgacttcatcggtaaatcttttggt

SEQ ID NO: 180689 - DNA, 25 bp, Saccharomyces pastorianus
agttcattcgattgctgcctcactt

SEQ ID NO: 180690 - DNA, 25 bp, Saccharomyces pastorianus
catctgcatactacctgagacttca

SEQ ID NO: 180691 - DNA, 25 bp, Saccharomyces pastorianus
gtgtcatcgatagtaacagcggcta

SEQ ID NO: 180692 - DNA, 25 bp, Saccharomyces pastorianus
gggagatgcaccagttcattcgatt

SEQ ID NO: 180693 - DNA, 25 bp, Saccharomyces pastorianus
gagtatttttgcgattttccctacg

SEQ ID NO: 180694 - DNA, 25 bp, Saccharomyces pastorianus
ggttgtactggccatgcgtgtattc

SEQ ID NO: 180695 - DNA, 25 bp, Saccharomyces pastorianus
tactttgttggtggttgtactggcc

SEQ ID NO: 180696 - DNA, 25 bp, Saccharomyces pastorianus
tactggccatgcgtgtattcatcta

SEQ ID NO: 180697 - DNA, 25 bp, Saccharomyces pastorianus
ctggccatgcgtgtattcatctatt

SEQ ID NO: 180698 - DNA, 25 bp, Saccharomyces pastorianus
ttgtactggccatgcgtgtattcat

SEQ ID NO: 180699 - DNA, 25 bp, Saccharomyces pastorianus
ttgttggtggttgtactggccatgc

SEQ ID NO: 180700 - DNA, 25 bp, Saccharomyces pastorianus
tgcgtgtattcatctattatagcta

SEQ ID NO: 180701 - DNA, 25 bp, Saccharomyces pastorianus
gtattcatctattatagctaccata

SEQ ID NO: 180702 - DNA, 25 bp, Saccharomyces pastorianus
aactactttgttggtggttgtactg

SEQ ID NO: 180703 - DNA, 25 bp, Saccharomyces pastorianus
ggccatgcgtgtattcatctattat

SEQ ID NO: 180704 - DNA, 25 bp, Saccharomyces pastorianus
ctttgttggtggttgtactggccat

SEQ ID NO: 180705 - DNA, 25 bp, Saccharomyces pastorianus
tacgtttactgtagggtccaccaat

SEQ ID NO: 180706 - DNA, 25 bp, Saccharomyces pastorianus
gctacaggagactcaaacctcgcga

SEQ ID NO: 180707 - DNA, 25 bp, Saccharomyces pastorianus
aagtcaaccgtattctagtagcagc

SEQ ID NO: 180708 - DNA, 25 bp, Saccharomyces pastorianus
aattcggtattgatcttcgctgtat

SEQ ID NO: 180709 - DNA, 25 bp, Saccharomyces pastorianus
agactatcgttgaagggcctgcact

SEQ ID NO: 180710 - DNA, 25 bp, Saccharomyces pastorianus
gaagacttactactccgattatgcg

SEQ ID NO: 180711 - DNA, 25 bp, Saccharomyces pastorianus
tgaacacttgccaaaattgccacaa

SEQ ID NO: 180712 - DNA, 25 bp, Saccharomyces pastorianus
tcaaggtgtcaggtgcggcaacgaa

SEQ ID NO: 180713 - DNA, 25 bp, Saccharomyces pastorianus
ggcctgcactggaaacctcgataat

SEQ ID NO: 180714 - DNA, 25 bp, Saccharomyces pastorianus
gccacaagctggcaattcaaggtgt

SEQ ID NO: 180715 - DNA, 25 bp, Saccharomyces pastorianus
gtccaccaatcttttccaatttcaa

SEQ ID NO: 180716 - DNA, 25 bp, Saccharomyces pastorianus
gatgaccctgacatggtcgcacgaa

SEQ ID NO: 180717 - DNA, 25 bp, Saccharomyces pastorianus
attgtgaatcttataactggtgtta

SEQ ID NO: 180718 - DNA, 25 bp, Saccharomyces pastorianus
catggtcgcacgaaaaccaggtatt

SEQ ID NO: 180719 - DNA, 25 bp, Saccharomyces pastorianus
tacttggtggcattctgttcagtag

SEQ ID NO: 180720 - DNA, 25 bp, Saccharomyces pastorianus
gaaaaccaggtattgtgaatcttat

SEQ ID NO: 180721 - DNA, 25 bp, Saccharomyces pastorianus
ataactggtgttacgttcgccatag

SEQ ID NO: 180722 - DNA, 25 bp, Saccharomyces pastorianus
tagtggttcgttccttttggtagcg

SEQ ID NO: 180723 - DNA, 25 bp, Saccharomyces pastorianus
gttccttttggtagcggtgcattca

SEQ ID NO: 180724 - DNA, 25 bp, Saccharomyces pastorianus
tggtgttacgttcgccataggcctc

SEQ ID NO: 180725 - DNA, 25 bp, Saccharomyces pastorianus
gtagcggtgcattcagatgaccctg

SEQ ID NO: 180726 - DNA, 25 bp, Saccharomyces pastorianus
aattccatacttggtggcattctgt

SEQ ID NO: 180727 - DNA, 25 bp, Saccharomyces pastorianus
gtactccacattcatgatccagttg

SEQ ID NO: 180728 - DNA, 25 bp, Saccharomyces pastorianus
atagccggtgttctgacgctgtcaa

SEQ ID NO: 180729 - DNA, 25 bp, Saccharomyces pastorianus
ttgtactttctttctggtctgcata

SEQ ID NO: 180730 - DNA, 25 bp, Saccharomyces pastorianus
acccgtctgcagaatccttaggaag

SEQ ID NO: 180731 - DNA, 25 bp, Saccharomyces pastorianus
aattactctttatatcacccgtctg

SEQ ID NO: 180732 - DNA, 25 bp, Saccharomyces pastorianus
taaatgagcgtgtgtgtgcctccgt

SEQ ID NO: 180733 - DNA, 25 bp, Saccharomyces pastorianus
tatgggccaggctacgaaaacgttc

SEQ ID NO: 180734 - DNA, 25 bp, Saccharomyces pastorianus
gtggattgcgtatatccttccaata

SEQ ID NO: 180735 - DNA, 25 bp, Saccharomyces pastorianus
cgggtcaatcctatgtttcgggtga

SEQ ID NO: 180736 - DNA, 25 bp, Saccharomyces pastorianus
attgctgcatttccattccggatga

SEQ ID NO: 180737 - DNA, 25 bp, Saccharomyces pastorianus
gaactagtagcagccgcgtgcgata

SEQ ID NO: 180738 - DNA, 25 bp, Saccharomyces pastorianus
tggagcaggcggatcgtattacaga

SEQ ID NO: 180739 - DNA, 25 bp, Saccharomyces pastorianus
acaacagtgactatgagcagccgcc

SEQ ID NO: 180740 - DNA, 25 bp, Saccharomyces pastorianus
ttatagcagatactcatccactcct

SEQ ID NO: 180741 - DNA, 25 bp, Saccharomyces pastorianus
gatacaaggccgtactattcagcta

SEQ ID NO: 180742 - DNA, 25 bp, Saccharomyces pastorianus
gtcttatggcgcgagatacaacagt

SEQ ID NO: 180743 - DNA, 25 bp, Saccharomyces pastorianus
gagcgcctcgcaagaagataatgac

SEQ ID NO: 180744 - DNA, 25 bp, Saccharomyces pastorianus
cagccgccccaagagggagacttga

SEQ ID NO: 180745 - DNA, 25 bp, Saccharomyces pastorianus
cagaggcggtaatgcgtcttatggc

SEQ ID NO: 180746 - DNA, 25 bp, Saccharomyces pastorianus
agcaggcattaccaagcacaaccat

SEQ ID NO: 180747 - DNA, 25 bp, Saccharomyces pastorianus
gggttatcaccatgcgagacgaagt

SEQ ID NO: 180748 - DNA, 25 bp, Saccharomyces pastorianus
gacttgagacaaaccggagcatact

SEQ ID NO: 180749 - DNA, 25 bp, Saccharomyces pastorianus
cgtgtattcctttgatgatgatttg

SEQ ID NO: 180750 - DNA, 25 bp, Saccharomyces pastorianus
gatacgtgtattcctttgatgatga

SEQ ID NO: 180751 - DNA, 25 bp, Saccharomyces pastorianus
acagctatcagtgatgacttcgagg

SEQ ID NO: 180752 - DNA, 25 bp, Saccharomyces pastorianus
ggtacagctatcagtgatgacttcg

SEQ ID NO: 180753 - DNA, 25 bp, Saccharomyces pastorianus
cgagggatacgtgtattcctttgat

SEQ ID NO: 180754 - DNA, 25 bp, Saccharomyces pastorianus
tacgtgtattcctttgatgatgatt

SEQ ID NO: 180755 - DNA, 25 bp, Saccharomyces pastorianus
gacttcgagggatacgtgtattcct

SEQ ID NO: 180756 - DNA, 25 bp, Saccharomyces pastorianus
tgatgacttcgagggatacgtgtat

SEQ ID NO: 180757 - DNA, 25 bp, Saccharomyces pastorianus
cttcgagggatacgtgtattccttt

SEQ ID NO: 180758 - DNA, 25 bp, Saccharomyces pastorianus
tcagtgatgacttcgagggatacgt

SEQ ID NO: 180759 - DNA, 25 bp, Saccharomyces pastorianus
gctatcagtgatgacttcgagggat

SEQ ID NO: 180760 - DNA, 25 bp, Saccharomyces pastorianus
atgactcttaatcataaggttaggg

SEQ ID NO: 180761 - DNA, 25 bp, Saccharomyces pastorianus
gcgtatgactcttaatcataaggtt

SEQ ID NO: 180762 - DNA, 25 bp, Saccharomyces pastorianus
cgcgtatgactcttaatcataaggt

SEQ ID NO: 180763 - DNA, 25 bp, Saccharomyces pastorianus
tacagggctattctttttttgttct

SEQ ID NO: 180764 - DNA, 25 bp, Saccharomyces pastorianus
cgtatgactcttaatcataaggtta

SEQ ID NO: 180765 - DNA, 25 bp, Saccharomyces pastorianus
gcgcgtatgactcttaatcataagg

SEQ ID NO: 180766 - DNA, 25 bp, Saccharomyces pastorianus
tatgactcttaatcataaggttagg

SEQ ID NO: 180767 - DNA, 25 bp, Saccharomyces pastorianus
gtatgactcttaatcataaggttag

SEQ ID NO: 180768 - DNA, 25 bp, Saccharomyces pastorianus
taatcataaggttaggggttcgagc

SEQ ID NO: 180769 - DNA, 25 bp, Saccharomyces pastorianus
cagggctattctttttttgttctat

SEQ ID NO: 180770 - DNA, 25 bp, Saccharomyces pastorianus
gggctattctttttttgttctatat

SEQ ID NO: 180771 - DNA, 25 bp, Saccharomyces pastorianus
ttggtgccaacagctggtgagagat

SEQ ID NO: 180772 - DNA, 25 bp, Saccharomyces pastorianus
ccaacagctggtgagagattagcct

SEQ ID NO: 180773 - DNA, 25 bp, Saccharomyces pastorianus
aacagctggtgagagattagcctgg

SEQ ID NO: 180774 - DNA, 25 bp, Saccharomyces pastorianus
ccaaggtgacagttacataatggca

SEQ ID NO: 180775 - DNA, 25 bp, Saccharomyces pastorianus
caacagctggtgagagattagcctg

SEQ ID NO: 180776 - DNA, 25 bp, Saccharomyces pastorianus
tgccaacagctggtgagagattagc

SEQ ID NO: 180777 - DNA, 25 bp, Saccharomyces pastorianus
ggtgccaacagctggtgagagatta

SEQ ID NO: 180778 - DNA, 25 bp, Saccharomyces pastorianus
gggccaaggtgacagttacataatg

SEQ ID NO: 180779 - DNA, 25 bp, Saccharomyces pastorianus
aagttggtgccaacagctggtgaga

SEQ ID NO: 180780 - DNA, 25 bp, Saccharomyces pastorianus
gtgccaacagctggtgagagattag

SEQ ID NO: 180781 - DNA, 25 bp, Saccharomyces pastorianus
gccaacagctggtgagagattagcc

SEQ ID NO: 180782 - DNA, 25 bp, Saccharomyces pastorianus
agcgggatcgaaccgctgatccccg

SEQ ID NO: 180783 - DNA, 25 bp, Saccharomyces pastorianus
tctagcgggatcgaaccgctgatcc

SEQ ID NO: 180784 - DNA, 25 bp, Saccharomyces pastorianus
ccccgcgttattagcacggtgcctt

SEQ ID NO: 180785 - DNA, 25 bp, Saccharomyces pastorianus
cgaaccgctgatccccgcgttatta

SEQ ID NO: 180786 - DNA, 25 bp, Saccharomyces pastorianus
ctagcgggatcgaaccgctgatccc

SEQ ID NO: 180787 - DNA, 25 bp, Saccharomyces pastorianus
ggatcgaaccgctgatccccgcgtt

SEQ ID NO: 180788 - DNA, 25 bp, Saccharomyces pastorianus
tagcgggatcgaaccgctgatcccc

SEQ ID NO: 180789 - DNA, 25 bp, Saccharomyces pastorianus
tcgaaccgctgatccccgcgttatt

SEQ ID NO: 180790 - DNA, 25 bp, Saccharomyces pastorianus
gatccccgcgttattagcacggtgc

SEQ ID NO: 180791 - DNA, 25 bp, Saccharomyces pastorianus
atcgaaccgctgatccccgcgttat

SEQ ID NO: 180792 - DNA, 25 bp, Saccharomyces pastorianus
gctgatccccgcgttattagcacgg

SEQ ID NO: 180793 - DNA, 25 bp, Saccharomyces pastorianus
gaagaggccctacattccgggacca

SEQ ID NO: 180794 - DNA, 25 bp, Saccharomyces pastorianus
atatcatgcacgagtacgtaccacc

SEQ ID NO: 180795 - DNA, 25 bp, Saccharomyces pastorianus
ccttcgccgaatcacagatcaacga

SEQ ID NO: 180796 - DNA, 25 bp, Saccharomyces pastorianus
cgtcttctgtgttttctgatggttt

SEQ ID NO: 180797 - DNA, 25 bp, Saccharomyces pastorianus
ttccgggaccacagattggacaaca

SEQ ID NO: 180798 - DNA, 25 bp, Saccharomyces pastorianus
atctcattagttatgctgtccccat

SEQ ID NO: 180799 - DNA, 25 bp, Saccharomyces pastorianus
atcaggatcatcttcattagtcatt

SEQ ID NO: 180800 - DNA, 25 bp, Saccharomyces pastorianus
ccattcctcgagcaaactctcaggg

SEQ ID NO: 180801 - DNA, 25 bp, Saccharomyces pastorianus
gtcagcggctattccatagcaggca

SEQ ID NO: 180802 - DNA, 25 bp, Saccharomyces pastorianus
agatcaacgatgtactcttcttcat

SEQ ID NO: 180803 - DNA, 25 bp, Saccharomyces pastorianus
gaaaccttgtgcactcatactgatc

SEQ ID NO: 180804 - DNA, 25 bp, Saccharomyces pastorianus
cgcgggcgtcgtgttgatgttcttc

SEQ ID NO: 180805 - DNA, 25 bp, Saccharomyces pastorianus
ttcaactacgcccacgcgtgcaagt

SEQ ID NO: 180806 - DNA, 25 bp, Saccharomyces pastorianus
tcagcagaagctgcaggtcaagcag

SEQ ID NO: 180807 - DNA, 25 bp, Saccharomyces pastorianus
agcaaaaggaacaacacagctcgtt

SEQ ID NO: 180808 - DNA, 25 bp, Saccharomyces pastorianus
gcgtgcaagtgcatcgcagggttct

SEQ ID NO: 180809 - DNA, 25 bp, Saccharomyces pastorianus
agaccggaattgaccctcagcagaa

SEQ ID NO: 180810 - DNA, 25 bp, Saccharomyces pastorianus
aagtgcatcgcagggttcttcgtgg

SEQ ID NO: 180811 - DNA, 25 bp, Saccharomyces pastorianus
ggaattgaccctcagcagaagctgc

SEQ ID NO: 180812 - DNA, 25 bp, Saccharomyces pastorianus
gcatcgcagggttcttcgtggtcgc

SEQ ID NO: 180813 - DNA, 25 bp, Saccharomyces pastorianus
tcttcgagaccggaattgaccctca

SEQ ID NO: 180814 - DNA, 25 bp, Saccharomyces pastorianus
aacaacacagctcgttcaactacgc

SEQ ID NO: 180815 - DNA, 25 bp, Saccharomyces pastorianus
aggaatccgcaagaaacttttcgag

SEQ ID NO: 180816 - DNA, 25 bp, Saccharomyces pastorianus
tgatttgtttatccactttattcag

SEQ ID NO: 180817 - DNA, 25 bp, Saccharomyces pastorianus
gaatatcttcttaaggaatccgcaa

SEQ ID NO: 180818 - DNA, 25 bp, Saccharomyces pastorianus
ttgaagcaatatctttcccgccatt

SEQ ID NO: 180819 - DNA, 25 bp, Saccharomyces pastorianus
aagactttgttcaagcagctttgag

SEQ ID NO: 180820 - DNA, 25 bp, Saccharomyces pastorianus
acgtacgcttgggattctaatgata

SEQ ID NO: 180821 - DNA, 25 bp, Saccharomyces pastorianus
agcaaacaggccagagttgtttcat

SEQ ID NO: 180822 - DNA, 25 bp, Saccharomyces pastorianus
gaactcttggcaggtacgtacgctt

SEQ ID NO: 180823 - DNA, 25 bp, Saccharomyces pastorianus
gcagctttgagtctagaactcttgg

SEQ ID NO: 180824 - DNA, 25 bp, Saccharomyces pastorianus
gggattctaatgatactcttgaagc

SEQ ID NO: 180825 - DNA, 25 bp, Saccharomyces pastorianus
ttgccagagcaatcttcatttgaga

SEQ ID NO: 180826 - DNA, 25 bp, Saccharomyces pastorianus
ttacgttcgcagcaagaggccatgt

SEQ ID NO: 180827 - DNA, 25 bp, Saccharomyces pastorianus
caatgctacgtttaactccagcgaa

SEQ ID NO: 180828 - DNA, 25 bp, Saccharomyces pastorianus
gagacgcaccagcaagaccgagttc

SEQ ID NO: 180829 - DNA, 25 bp, Saccharomyces pastorianus
gaagcatcgtttattcccattacta

SEQ ID NO: 180830 - DNA, 25 bp, Saccharomyces pastorianus
ttgatctatccttctacgagacgca

SEQ ID NO: 180831 - DNA, 25 bp, Saccharomyces pastorianus
ataactcattgattccggcagacat

SEQ ID NO: 180832 - DNA, 25 bp, Saccharomyces pastorianus
aacgatcttcagctacggtgggcag

SEQ ID NO: 180833 - DNA, 25 bp, Saccharomyces pastorianus
gatgcgtcacttacgacggcattgg

SEQ ID NO: 180834 - DNA, 25 bp, Saccharomyces pastorianus
tcgcacattctgcacgatgaggaca

SEQ ID NO: 180835 - DNA, 25 bp, Saccharomyces pastorianus
agaccgagttcgcatcgataccatt

SEQ ID NO: 180836 - DNA, 25 bp, Saccharomyces pastorianus
aagcaatggatcaactcctcatcgc

SEQ ID NO: 180837 - DNA, 25 bp, Saccharomyces pastorianus
ctctaacttcgaagctttccataac

SEQ ID NO: 180838 - DNA, 25 bp, Saccharomyces pastorianus
ctaacttcgaagctttccataactt

SEQ ID NO: 180839 - DNA, 25 bp, Saccharomyces pastorianus
tctaacttcgaagctttccataact

SEQ ID NO: 180840 - DNA, 25 bp, Saccharomyces pastorianus
aacttcgaagctttccataacttct

SEQ ID NO: 180841 - DNA, 25 bp, Saccharomyces pastorianus
tcctctaacttcgaagctttccata

SEQ ID NO: 180842 - DNA, 25 bp, Saccharomyces pastorianus
cttcgaagctttccataacttctgt

SEQ ID NO: 180843 - DNA, 25 bp, Saccharomyces pastorianus
ttcctctaacttcgaagctttccat

SEQ ID NO: 180844 - DNA, 25 bp, Saccharomyces pastorianus
acttcgaagctttccataacttctg

SEQ ID NO: 180845 - DNA, 25 bp, Saccharomyces pastorianus
taacttcgaagctttccataacttc

SEQ ID NO: 180846 - DNA, 25 bp, Saccharomyces pastorianus
cctctaacttcgaagctttccataa

SEQ ID NO: 180847 - DNA, 25 bp, Saccharomyces pastorianus
gtttgtaccgtacacagtgttgctt

SEQ ID NO: 180848 - DNA, 25 bp, Saccharomyces pastorianus
agtgttgcttgctaattgcatgatc

SEQ ID NO: 180849 - DNA, 25 bp, Saccharomyces pastorianus
gtaccgtacacagtgttgcttgcta

SEQ ID NO: 180850 - DNA, 25 bp, Saccharomyces pastorianus
cacagtgttgcttgctaattgcatg

SEQ ID NO: 180851 - DNA, 25 bp, Saccharomyces pastorianus
aatatgtgtcgtttctgtttgtacc

SEQ ID NO: 180852 - DNA, 25 bp, Saccharomyces pastorianus
gtgtcgtttctgtttgtaccgtaca

SEQ ID NO: 180853 - DNA, 25 bp, Saccharomyces pastorianus
gtcgtttctgtttgtaccgtacaca

SEQ ID NO: 180854 - DNA, 25 bp, Saccharomyces pastorianus
ccgtacacagtgttgcttgctaatt

SEQ ID NO: 180855 - DNA, 25 bp, Saccharomyces pastorianus
atgtgtcgtttctgtttgtaccgta

SEQ ID NO: 180856 - DNA, 25 bp, Saccharomyces pastorianus
gtacacagtgttgcttgctaattgc

SEQ ID NO: 180857 - DNA, 25 bp, Saccharomyces pastorianus
gtttctgtttgtaccgtacacagtg

SEQ ID NO: 180858 - DNA, 25 bp, Saccharomyces pastorianus
tacattcctgtagtcgtggtaggta

SEQ ID NO: 180859 - DNA, 25 bp, Saccharomyces pastorianus
atgcaccctttctagaaacgtctgc

SEQ ID NO: 180860 - DNA, 25 bp, Saccharomyces pastorianus
cattcaatcatactttgtggacgaa

SEQ ID NO: 180861 - DNA, 25 bp, Saccharomyces pastorianus
gatgacaaagtatccattttggaca

SEQ ID NO: 180862 - DNA, 25 bp, Saccharomyces pastorianus
gagttactgtcttattatcagcaaa

SEQ ID NO: 180863 - DNA, 25 bp, Saccharomyces pastorianus
cagttgaatgcaccctttctagaaa

SEQ ID NO: 180864 - DNA, 25 bp, Saccharomyces pastorianus
ttcctttgatgagttactgtcttat

SEQ ID NO: 180865 - DNA, 25 bp, Saccharomyces pastorianus
atgaagacgggttacgcctggccaa

SEQ ID NO: 180866 - DNA, 25 bp, Saccharomyces pastorianus
ggacgaatatgaccctactatcgaa

SEQ ID NO: 180867 - DNA, 25 bp, Saccharomyces pastorianus
tattccgtcacctctagaaattcct

SEQ ID NO: 180868 - DNA, 25 bp, Saccharomyces pastorianus
ccattttggacattctagatactgc

SEQ ID NO: 180869 - DNA, 25 bp, Saccharomyces pastorianus
taatgctctctactcactttattga

SEQ ID NO: 180870 - DNA, 25 bp, Saccharomyces pastorianus
tttgatataatgctctctactcact

SEQ ID NO: 180871 - DNA, 25 bp, Saccharomyces pastorianus
ttttttgatataatgctctctactc

SEQ ID NO: 180872 - DNA, 25 bp, Saccharomyces pastorianus
aatgctctctactcactttattgag

SEQ ID NO: 180873 - DNA, 25 bp, Saccharomyces pastorianus
gatataatgctctctactcacttta

SEQ ID NO: 180874 - DNA, 25 bp, Saccharomyces pastorianus
tataatgctctctactcactttatt

SEQ ID NO: 180875 - DNA, 25 bp, Saccharomyces pastorianus
ctactcactttattgagtggcgatt

SEQ ID NO: 180876 - DNA, 25 bp, Saccharomyces pastorianus
ctcactttattgagtggcgatttgc

SEQ ID NO: 180877 - DNA, 25 bp, Saccharomyces pastorianus
actttattgagtggcgatttgctat

SEQ ID NO: 180878 - DNA, 25 bp, Saccharomyces pastorianus
tgctctctactcactttattgagtg

SEQ ID NO: 180879 - DNA, 25 bp, Saccharomyces pastorianus
tctctactcactttattgagtggcg

SEQ ID NO: 180880 - DNA, 25 bp, Saccharomyces pastorianus
aatggctagatctgtttggaaccac

SEQ ID NO: 180881 - DNA, 25 bp, Saccharomyces pastorianus
tgctaccgtgccattctttggtatt

SEQ ID NO: 180882 - DNA, 25 bp, Saccharomyces pastorianus
gtaatgatgtcgaaggtgtccttgc

SEQ ID NO: 180883 - DNA, 25 bp, Saccharomyces pastorianus
tatcattgaccctgttacaggtgtt

SEQ ID NO: 180884 - DNA, 25 bp, Saccharomyces pastorianus
tttggcaggtgctgtcccaacaaaa

SEQ ID NO: 180885 - DNA, 25 bp, Saccharomyces pastorianus
aacaaaacctggttctgctaccgtg

SEQ ID NO: 180886 - DNA, 25 bp, Saccharomyces pastorianus
acgaccgttacatggatacttactt

SEQ ID NO: 180887 - DNA, 25 bp, Saccharomyces pastorianus
aatcaccatggccatcaatggctag

SEQ ID NO: 180888 - DNA, 25 bp, Saccharomyces pastorianus
tggttctcatttaattgctcctttg

SEQ ID NO: 180889 - DNA, 25 bp, Saccharomyces pastorianus
atacttacttgaaaccttatcctgg

SEQ ID NO: 180890 - DNA, 25 bp, Saccharomyces pastorianus
tttcacaggtgatggtgctggtaga

SEQ ID NO: 180891 - DNA, 25 bp, Saccharomyces pastorianus
aatccctttgatactcctgttgata

SEQ ID NO: 180892 - DNA, 25 bp, Saccharomyces pastorianus
gaagtcgacaatccctttgatactc

SEQ ID NO: 180893 - DNA, 25 bp, Saccharomyces pastorianus
gttcttttcatagttacaacactaa

SEQ ID NO: 180894 - DNA, 25 bp, Saccharomyces pastorianus
atagcactaactgttcttttcatag

SEQ ID NO: 180895 - DNA, 25 bp, Saccharomyces pastorianus
agccagaagtcgacaatccctttga

SEQ ID NO: 180896 - DNA, 25 bp, Saccharomyces pastorianus
gggagctgcaatagcactaactgtt

SEQ ID NO: 180897 - DNA, 25 bp, Saccharomyces pastorianus
gtatgggatgcaagaaaggcttcta

SEQ ID NO: 180898 - DNA, 25 bp, Saccharomyces pastorianus
ttgatactcctgttgataagtgcga

SEQ ID NO: 180899 - DNA, 25 bp, Saccharomyces pastorianus
tatcgatacacacctagtaagggag

SEQ ID NO: 180900 - DNA, 25 bp, Saccharomyces pastorianus
tacacacctagtaagggagctgcaa

SEQ ID NO: 180901 - DNA, 25 bp, Saccharomyces pastorianus
aggcttctaagccagaagtcgacaa

SEQ ID NO: 180902 - DNA, 25 bp, Saccharomyces pastorianus
gacggttcgcataaatccggtagaa

SEQ ID NO: 180903 - DNA, 25 bp, Saccharomyces pastorianus
agtgcgcacgatgacggtctggatt

SEQ ID NO: 180904 - DNA, 25 bp, Saccharomyces pastorianus
aaagactatattccgaccccggatg

SEQ ID NO: 180905 - DNA, 25 bp, Saccharomyces pastorianus
ggtctggattcattctcaaaaggcg

SEQ ID NO: 180906 - DNA, 25 bp, Saccharomyces pastorianus
aaaggcgattcaggcgctggagcca

SEQ ID NO: 180907 - DNA, 25 bp, Saccharomyces pastorianus
catcaaattttctgccactgtggag

SEQ ID NO: 180908 - DNA, 25 bp, Saccharomyces pastorianus
tctgcctaacgatctgaaacacctg

SEQ ID NO: 180909 - DNA, 25 bp, Saccharomyces pastorianus
gtctggatctaggagtgcgcacgat

SEQ ID NO: 180910 - DNA, 25 bp, Saccharomyces pastorianus
tgggttctggtcatacaaagcacaa

SEQ ID NO: 180911 - DNA, 25 bp, Saccharomyces pastorianus
accccggatgcttctatgacttgga

SEQ ID NO: 180912 - DNA, 25 bp, Saccharomyces pastorianus
tatacgggcagtttccaggagacca

SEQ ID NO: 180913 - DNA, 25 bp, Saccharomyces pastorianus
atgaattcgccgtgagtactccatt

SEQ ID NO: 180914 - DNA, 25 bp, Saccharomyces pastorianus
gaactactgcctgcaaattccggaa

SEQ ID NO: 180915 - DNA, 25 bp, Saccharomyces pastorianus
cctgctgagctgtctttatcgttat

SEQ ID NO: 180916 - DNA, 25 bp, Saccharomyces pastorianus
ttaagttagccatccttgttacgcc

SEQ ID NO: 180917 - DNA, 25 bp, Saccharomyces pastorianus
ggattgcaatttcctacactcaacc

SEQ ID NO: 180918 - DNA, 25 bp, Saccharomyces pastorianus
agctcctcaatcttgtcacttaatg

SEQ ID NO: 180919 - DNA, 25 bp, Saccharomyces pastorianus
gagacgctttcctggcttaatgaat

SEQ ID NO: 180920 - DNA, 25 bp, Saccharomyces pastorianus
aatgctatttgcatactgccctgct

SEQ ID NO: 180921 - DNA, 25 bp, Saccharomyces pastorianus
aagcacgtcttttgtctctctttta

SEQ ID NO: 180922 - DNA, 25 bp, Saccharomyces pastorianus
gccgcattcatcagcctttaagtta

SEQ ID NO: 180923 - DNA, 25 bp, Saccharomyces pastorianus
tgttacgccgttcgttgagacgctt

SEQ ID NO: 180924 - DNA, 25 bp, Saccharomyces pastorianus
tgtttaactgttcttggcctttgtt

SEQ ID NO: 180925 - DNA, 25 bp, Saccharomyces pastorianus
ttcttggcctttgtttcattgccta

SEQ ID NO: 180926 - DNA, 25 bp, Saccharomyces pastorianus
actgttcttggcctttgtttcattg

SEQ ID NO: 180927 - DNA, 25 bp, Saccharomyces pastorianus
tggcctttgtttcattgcctacaag

SEQ ID NO: 180928 - DNA, 25 bp, Saccharomyces pastorianus
ggcctttgtttcattgcctacaagg

SEQ ID NO: 180929 - DNA, 25 bp, Saccharomyces pastorianus
cattgcctacaagggcatgcacgaa

SEQ ID NO: 180930 - DNA, 25 bp, Saccharomyces pastorianus
gtttcattgcctacaagggcatgca

SEQ ID NO: 180931 - DNA, 25 bp, Saccharomyces pastorianus
ctgttcttggcctttgtttcattgc

SEQ ID NO: 180932 - DNA, 25 bp, Saccharomyces pastorianus
ttaactgttcttggcctttgtttca

SEQ ID NO: 180933 - DNA, 25 bp, Saccharomyces pastorianus
cctttgtttcattgcctacaagggc

SEQ ID NO: 180934 - DNA, 25 bp, Saccharomyces pastorianus
ttggcctttgtttcattgcctacaa

SEQ ID NO: 180935 - DNA, 25 bp, Saccharomyces pastorianus
actccttgaccggtgaagctgctgc

SEQ ID NO: 180936 - DNA, 25 bp, Saccharomyces pastorianus
gttcactccttgaccggtgaagctg

SEQ ID NO: 180937 - DNA, 25 bp, Saccharomyces pastorianus
tgaagctgctgccaatgccttgcca

SEQ ID NO: 180938 - DNA, 25 bp, Saccharomyces pastorianus
tccttgaccggtgaagctgctgcca

SEQ ID NO: 180939 - DNA, 25 bp, Saccharomyces pastorianus
gggtactggtcgtgctgtcgcccgt

SEQ ID NO: 180940 - DNA, 25 bp, Saccharomyces pastorianus
agctgctgccaatgccttgccattg

SEQ ID NO: 180941 - DNA, 25 bp, Saccharomyces pastorianus
ggtgaagctgctgccaatgccttgc

SEQ ID NO: 180942 - DNA, 25 bp, Saccharomyces pastorianus
tgaccggtgaagctgctgccaatgc

SEQ ID NO: 180943 - DNA, 25 bp, Saccharomyces pastorianus
gaagctgctgccaatgccttgccat

SEQ ID NO: 180944 - DNA, 25 bp, Saccharomyces pastorianus
cttgaccggtgaagctgctgccaat

SEQ ID NO: 180945 - DNA, 25 bp, Saccharomyces pastorianus
accggtgaagctgctgccaatgcct

SEQ ID NO: 180946 - DNA, 25 bp, Saccharomyces pastorianus
gtggaacgactaatgcatctgtgga

SEQ ID NO: 180947 - DNA, 25 bp, Saccharomyces pastorianus
gaaggtgtgaaagcgctgactaaaa

SEQ ID NO: 180948 - DNA, 25 bp, Saccharomyces pastorianus
tacaaaccaatctagtggaacgact

SEQ ID NO: 180949 - DNA, 25 bp, Saccharomyces pastorianus
taatgcatctgtggaggtactttca

SEQ ID NO: 180950 - DNA, 25 bp, Saccharomyces pastorianus
ggtactttcagaggatggacctatg

SEQ ID NO: 180951 - DNA, 25 bp, Saccharomyces pastorianus
gcaagaaggtgtgaaagcgctgact

SEQ ID NO: 180952 - DNA, 25 bp, Saccharomyces pastorianus
gtgaaagcgctgactaaaattcttt

SEQ ID NO: 180953 - DNA, 25 bp, Saccharomyces pastorianus
acacctacaaaccaatctagtggaa

SEQ ID NO: 180954 - DNA, 25 bp, Saccharomyces pastorianus
acgactaatgcatctgtggaggtac

SEQ ID NO: 180955 - DNA, 25 bp, Saccharomyces pastorianus
ggacctatgccaataaacgttatga

SEQ ID NO: 180956 - DNA, 25 bp, Saccharomyces pastorianus
ttcagaggatggacctatgccaata

SEQ ID NO: 180957 - DNA, 25 bp, Saccharomyces pastorianus
taccttcggtatcgctgttcaaaca

SEQ ID NO: 180958 - DNA, 25 bp, Saccharomyces pastorianus
acgacggtcaaattcaggccacagc

SEQ ID NO: 180959 - DNA, 25 bp, Saccharomyces pastorianus
aattcttccagcaaaagccctactt

SEQ ID NO: 180960 - DNA, 25 bp, Saccharomyces pastorianus
gatggtccaactccacaagcaggtg

SEQ ID NO: 180961 - DNA, 25 bp, Saccharomyces pastorianus
agaacttccgtcattacagtggtaa

SEQ ID NO: 180962 - DNA, 25 bp, Saccharomyces pastorianus
aactgcttccgccaatgttaagaga

SEQ ID NO: 180963 - DNA, 25 bp, Saccharomyces pastorianus
aagcaggtgccatctatgcggctgg

SEQ ID NO: 180964 - DNA, 25 bp, Saccharomyces pastorianus
tgcggctggttggtctatcacatca

SEQ ID NO: 180965 - DNA, 25 bp, Saccharomyces pastorianus
taccttggccagtgacagtaccgaa

SEQ ID NO: 180966 - DNA, 25 bp, Saccharomyces pastorianus
ttggcccttggtgatgacgatgttt

SEQ ID NO: 180967 - DNA, 25 bp, Saccharomyces pastorianus
gctaccactgctgtgtctttagaga

SEQ ID NO: 180968 - DNA, 25 bp, Saccharomyces pastorianus
agtgttcaagatcaaccctctgttg

SEQ ID NO: 180969 - DNA, 25 bp, Saccharomyces pastorianus
agatcaaccctctgttgccgtggga

SEQ ID NO: 180970 - DNA, 25 bp, Saccharomyces pastorianus
tctgtttctgaaatcgaaattgaaa

SEQ ID NO: 180971 - DNA, 25 bp, Saccharomyces pastorianus
cctctgttgccgtgggaagtttctt

SEQ ID NO: 180972 - DNA, 25 bp, Saccharomyces pastorianus
ctgttgccgtgggaagtttcttcaa

SEQ ID NO: 180973 - DNA, 25 bp, Saccharomyces pastorianus
aagtgttcaagatcaaccctctgtt

SEQ ID NO: 180974 - DNA, 25 bp, Saccharomyces pastorianus
tcaagatcaaccctctgttgccgtg

SEQ ID NO: 180975 - DNA, 25 bp, Saccharomyces pastorianus
tgccgtgggaagtttcttcaagggc

SEQ ID NO: 180976 - DNA, 25 bp, Saccharomyces pastorianus
atcaaccctctgttgccgtgggaag

SEQ ID NO: 180977 - DNA, 25 bp, Saccharomyces pastorianus
tgttcaagatcaaccctctgttgcc

SEQ ID NO: 180978 - DNA, 25 bp, Saccharomyces pastorianus
caaccctctgttgccgtgggaagtt

SEQ ID NO: 180979 - DNA, 25 bp, Saccharomyces pastorianus
gaaaactcgctcaaacaatggatca

SEQ ID NO: 180980 - DNA, 25 bp, Saccharomyces pastorianus
caccactagatgtgttcctgataga

SEQ ID NO: 180981 - DNA, 25 bp, Saccharomyces pastorianus
atggtgattccaaaacgcagcaaaa

SEQ ID NO: 180982 - DNA, 25 bp, Saccharomyces pastorianus
atgtctacgtccacaatttggtcga

SEQ ID NO: 180983 - DNA, 25 bp, Saccharomyces pastorianus
gagtgaagctcttttaatggcgaaa

SEQ ID NO: 180984 - DNA, 25 bp, Saccharomyces pastorianus
ggaacttgctatcgaaaaccacact

SEQ ID NO: 180985 - DNA, 25 bp, Saccharomyces pastorianus
catctcttcgaaattgctgttgcta

SEQ ID NO: 180986 - DNA, 25 bp, Saccharomyces pastorianus
agatttggtagttttgcgcccgtca

SEQ ID NO: 180987 - DNA, 25 bp, Saccharomyces pastorianus
atatccatgactggtggtatcccct

SEQ ID NO: 180988 - DNA, 25 bp, Saccharomyces pastorianus
gtttcagatctttcttcaacaacac

SEQ ID NO: 180989 - DNA, 25 bp, Saccharomyces pastorianus
gcgcccgtcagaacaaattcatttt

SEQ ID NO: 180990 - DNA, 25 bp, Saccharomyces pastorianus
atgctcacaaatacttggacggtat

SEQ ID NO: 180991 - DNA, 25 bp, Saccharomyces pastorianus
tgggtatttgattctaacatcttat

SEQ ID NO: 180992 - DNA, 25 bp, Saccharomyces pastorianus
ttgttatggtactcaggctgctgct

SEQ ID NO: 180993 - DNA, 25 bp, Saccharomyces pastorianus
acttgttatggtactcaggctgctg

SEQ ID NO: 180994 - DNA, 25 bp, Saccharomyces pastorianus
aaggaatctgaagtttccggctccg

SEQ ID NO: 180995 - DNA, 25 bp, Saccharomyces pastorianus
ggctccgttgcatccggttcttcta

SEQ ID NO: 180996 - DNA, 25 bp, Saccharomyces pastorianus
tgaagtttccggctccgttgcatcc

SEQ ID NO: 180997 - DNA, 25 bp, Saccharomyces pastorianus
tgctgcttatgggtatttgattcta

SEQ ID NO: 180998 - DNA, 25 bp, Saccharomyces pastorianus
gaatctgaagtttccggctccgttg

SEQ ID NO: 180999 - DNA, 25 bp, Saccharomyces pastorianus
gctgctgctgcttatgggtatttga

SEQ ID NO: 181000 - DNA, 25 bp, Saccharomyces pastorianus
ttctatgctcacaaatacttggacg

SEQ ID NO: 181001 - DNA, 25 bp, Saccharomyces pastorianus
tgaaacctacccagttgaaatcgct

SEQ ID NO: 181002 - DNA, 25 bp, Saccharomyces pastorianus
tttccaagccgctcatccaactgaa

SEQ ID NO: 181003 - DNA, 25 bp, Saccharomyces pastorianus
ttggcccaatactactctttccaag

SEQ ID NO: 181004 - DNA, 25 bp, Saccharomyces pastorianus
aacctacccagttgaaatcgctgaa

SEQ ID NO: 181005 - DNA, 25 bp, Saccharomyces pastorianus
actactctttccaagccgctcatcc

SEQ ID NO: 181006 - DNA, 25 bp, Saccharomyces pastorianus
atactactctttccaagccgctcat

SEQ ID NO: 181007 - DNA, 25 bp, Saccharomyces pastorianus
acccagttgaaatcgctgaagccgt

SEQ ID NO: 181008 - DNA, 25 bp, Saccharomyces pastorianus
cccaatactactctttccaagccgc

SEQ ID NO: 181009 - DNA, 25 bp, Saccharomyces pastorianus
tactctttccaagccgctcatccaa

SEQ ID NO: 181010 - DNA, 25 bp, Saccharomyces pastorianus
agttgaaatcgctgaagccgttttc

SEQ ID NO: 181011 - DNA, 25 bp, Saccharomyces pastorianus
tactactctttccaagccgctcatc

SEQ ID NO: 181012 - DNA, 25 bp, Saccharomyces pastorianus
gttgccttgtgccacgcaaaacgag

SEQ ID NO: 181013 - DNA, 25 bp, Saccharomyces pastorianus
tggagcagatcaacgacatcgccgc

SEQ ID NO: 181014 - DNA, 25 bp, Saccharomyces pastorianus
gagatggcgcagaactcccagaaag

SEQ ID NO: 181015 - DNA, 25 bp, Saccharomyces pastorianus
agtacgctaccttcggcgagaacaa

SEQ ID NO: 181016 - DNA, 25 bp, Saccharomyces pastorianus
aaaggctgccaaccttggtggtgtc

SEQ ID NO: 181017 - DNA, 25 bp, Saccharomyces pastorianus
gacgcagtctggtttggaccaccaa

SEQ ID NO: 181018 - DNA, 25 bp, Saccharomyces pastorianus
gtctcggagacaggtatcactttgg

SEQ ID NO: 181019 - DNA, 25 bp, Saccharomyces pastorianus
gaacactaagatcttgccgtcactg

SEQ ID NO: 181020 - DNA, 25 bp, Saccharomyces pastorianus
tcgcagggctgcatcgtctcggaga

SEQ ID NO: 181021 - DNA, 25 bp, Saccharomyces pastorianus
gtcactggtcaagggtgccaacatt

SEQ ID NO: 181022 - DNA, 25 bp, Saccharomyces pastorianus
accaagatccacttcaagtcgctga

SEQ ID NO: 181023 - DNA, 25 bp, Saccharomyces pastorianus
tcggagctattgcaaataaaaaccc

SEQ ID NO: 181024 - DNA, 25 bp, Saccharomyces pastorianus
ccaacgcagtggaatcgctatcgga

SEQ ID NO: 181025 - DNA, 25 bp, Saccharomyces pastorianus
gcagtggaatcgctatcggagctat

SEQ ID NO: 181026 - DNA, 25 bp, Saccharomyces pastorianus
gaccagagttttataataaggccgg

SEQ ID NO: 181027 - DNA, 25 bp, Saccharomyces pastorianus
aatggaatgcggtagagaactgcta

SEQ ID NO: 181028 - DNA, 25 bp, Saccharomyces pastorianus
tcttagccaacgcagtggaatcgct

SEQ ID NO: 181029 - DNA, 25 bp, Saccharomyces pastorianus
gttttataataaggccggatatgtg

SEQ ID NO: 181030 - DNA, 25 bp, Saccharomyces pastorianus
ataaaaacccccgaagtgatcatga

SEQ ID NO: 181031 - DNA, 25 bp, Saccharomyces pastorianus
gtgatcatgaaacgaagaccagagt

SEQ ID NO: 181032 - DNA, 25 bp, Saccharomyces pastorianus
agaaccactgcattaatggaatgcg

SEQ ID NO: 181033 - DNA, 25 bp, Saccharomyces pastorianus
atcgctatcggagctattgcaaata

SEQ ID NO: 181034 - DNA, 25 bp, Saccharomyces pastorianus
acgatgataccaagagccaacagat

SEQ ID NO: 181035 - DNA, 25 bp, Saccharomyces pastorianus
aacagatccatcacagcaatatgta

SEQ ID NO: 181036 - DNA, 25 bp, Saccharomyces pastorianus
gatccatcacagcaatatgtaacac

SEQ ID NO: 181037 - DNA, 25 bp, Saccharomyces pastorianus
gcaatatgtaacactctgcgacaag

SEQ ID NO: 181038 - DNA, 25 bp, Saccharomyces pastorianus
tcgaggaacgatgataccaagagcc

SEQ ID NO: 181039 - DNA, 25 bp, Saccharomyces pastorianus
aggaacgatgataccaagagccaac

SEQ ID NO: 181040 - DNA, 25 bp, Saccharomyces pastorianus
acagcaatatgtaacactctgcgac

SEQ ID NO: 181041 - DNA, 25 bp, Saccharomyces pastorianus
ggaacgatgataccaagagccaaca

SEQ ID NO: 181042 - DNA, 25 bp, Saccharomyces pastorianus
atcacagcaatatgtaacactctgc

SEQ ID NO: 181043 - DNA, 25 bp, Saccharomyces pastorianus
gaacgatgataccaagagccaacag

SEQ ID NO: 181044 - DNA, 25 bp, Saccharomyces pastorianus
gccaacagatccatcacagcaatat

SEQ ID NO: 181045 - DNA, 25 bp, Saccharomyces pastorianus
aagggccgcgtttaatagtcacatc

SEQ ID NO: 181046 - DNA, 25 bp, Saccharomyces pastorianus
atatgtactacgcttctgttccttt

SEQ ID NO: 181047 - DNA, 25 bp, Saccharomyces pastorianus
attcgatagacttttcgcggcacgt

SEQ ID NO: 181048 - DNA, 25 bp, Saccharomyces pastorianus
atgcctattcgatagacttttcgcg

SEQ ID NO: 181049 - DNA, 25 bp, Saccharomyces pastorianus
ttctattgttctcgaatgcctattc

SEQ ID NO: 181050 - DNA, 25 bp, Saccharomyces pastorianus
gagaaaagacctcaaagggccgcgt

SEQ ID NO: 181051 - DNA, 25 bp, Saccharomyces pastorianus
gttccttttctattgttctcgaatg

SEQ ID NO: 181052 - DNA, 25 bp, Saccharomyces pastorianus
gaatacgtgtctctaaacgcagatg

SEQ ID NO: 181053 - DNA, 25 bp, Saccharomyces pastorianus
ggtgcgaaatgataataccactgaa

SEQ ID NO: 181054 - DNA, 25 bp, Saccharomyces pastorianus
aaacgggtctatgcataatatgtac

SEQ ID NO: 181055 - DNA, 25 bp, Saccharomyces pastorianus
gcagatcatacttatttgagcgaaa

SEQ ID NO: 181056 - DNA, 25 bp, Saccharomyces pastorianus
caccattgagaaatgggtgaatttt

SEQ ID NO: 181057 - DNA, 25 bp, Saccharomyces pastorianus
tacaccattgagaaatgggtgaatt

SEQ ID NO: 181058 - DNA, 25 bp, Saccharomyces pastorianus
cattgagaaatgggtgaattttgag

SEQ ID NO: 181059 - DNA, 25 bp, Saccharomyces pastorianus
agaaatgggtgaattttgagataat

SEQ ID NO: 181060 - DNA, 25 bp, Saccharomyces pastorianus
tgagaaatgggtgaattttgagata

SEQ ID NO: 181061 - DNA, 25 bp, Saccharomyces pastorianus
accattgagaaatgggtgaattttg

SEQ ID NO: 181062 - DNA, 25 bp, Saccharomyces pastorianus
acaccattgagaaatgggtgaattt

SEQ ID NO: 181063 - DNA, 25 bp, Saccharomyces pastorianus
ttgagaaatgggtgaattttgagat

SEQ ID NO: 181064 - DNA, 25 bp, Saccharomyces pastorianus
ccattgagaaatgggtgaattttga

SEQ ID NO: 181065 - DNA, 25 bp, Saccharomyces pastorianus
gaaatgggtgaattttgagataatt

SEQ ID NO: 181066 - DNA, 25 bp, Saccharomyces pastorianus
aaatgggtgaattttgagataattg

SEQ ID NO: 181067 - DNA, 25 bp, Saccharomyces pastorianus
agttgtgttgtcattcctttggatt

SEQ ID NO: 181068 - DNA, 25 bp, Saccharomyces pastorianus
tattgtgggaaacctggctgttgtc

SEQ ID NO: 181069 - DNA, 25 bp, Saccharomyces pastorianus
taactatattatttggtgcgccatt

SEQ ID NO: 181070 - DNA, 25 bp, Saccharomyces pastorianus
gttgctaagttttttgattcctaca

SEQ ID NO: 181071 - DNA, 25 bp, Saccharomyces pastorianus
ttgttggaggttatttgggcgcttt

SEQ ID NO: 181072 - DNA, 25 bp, Saccharomyces pastorianus
gaattggccaattcctattgttgtt

SEQ ID NO: 181073 - DNA, 25 bp, Saccharomyces pastorianus
attttgcatttttagcataccctgc

SEQ ID NO: 181074 - DNA, 25 bp, Saccharomyces pastorianus
gcactactttattactacgtttttg

SEQ ID NO: 181075 - DNA, 25 bp, Saccharomyces pastorianus
gttgagctttcccacaatgttatta

SEQ ID NO: 181076 - DNA, 25 bp, Saccharomyces pastorianus
gattcctacacaagttgcttattta

SEQ ID NO: 181077 - DNA, 25 bp, Saccharomyces pastorianus
ttacatttttgttgagctttcccac

SEQ ID NO: 181078 - DNA, 25 bp, Saccharomyces pastorianus
agtggttgacctacagcgatgtctt

SEQ ID NO: 181079 - DNA, 25 bp, Saccharomyces pastorianus
atgggcaccttcaatctcttatgga

SEQ ID NO: 181080 - DNA, 25 bp, Saccharomyces pastorianus
tcatggccactcttacgcaattgtt

SEQ ID NO: 181081 - DNA, 25 bp, Saccharomyces pastorianus
ggcaggaatctataccccatgcata

SEQ ID NO: 181082 - DNA, 25 bp, Saccharomyces pastorianus
gttaccaatctctggcaggaatcta

SEQ ID NO: 181083 - DNA, 25 bp, Saccharomyces pastorianus
atctcttatggattcaatgcgtaaa

SEQ ID NO: 181084 - DNA, 25 bp, Saccharomyces pastorianus
aaacagacactcacttttgaacggg

SEQ ID NO: 181085 - DNA, 25 bp, Saccharomyces pastorianus
tacgcaattgtttcacctggtaact

SEQ ID NO: 181086 - DNA, 25 bp, Saccharomyces pastorianus
gtatctttgtattcatcatgggcac

SEQ ID NO: 181087 - DNA, 25 bp, Saccharomyces pastorianus
ggtgatgcaatccatcatggccact

SEQ ID NO: 181088 - DNA, 25 bp, Saccharomyces pastorianus
acctggtaactcgtatggctatctt

SEQ ID NO: 181089 - DNA, 25 bp, Saccharomyces pastorianus
aagtcgtgaagattggctccatgca

SEQ ID NO: 181090 - DNA, 25 bp, Saccharomyces pastorianus
gcgaactgccccacttaaaaatcaa

SEQ ID NO: 181091 - DNA, 25 bp, Saccharomyces pastorianus
gagaatactatctgctaccaagtag

SEQ ID NO: 181092 - DNA, 25 bp, Saccharomyces pastorianus
gtacccgctcttcgtcaaagatata

SEQ ID NO: 181093 - DNA, 25 bp, Saccharomyces pastorianus
aacggcaccaagttgttgaatgtca

SEQ ID NO: 181094 - DNA, 25 bp, Saccharomyces pastorianus
gaaagcccagcaacaaggcatcttt

SEQ ID NO: 181095 - DNA, 25 bp, Saccharomyces pastorianus
atctactcagggtgctggcgaactg

SEQ ID NO: 181096 - DNA, 25 bp, Saccharomyces pastorianus
atccattgttgatgccagaaagccc

SEQ ID NO: 181097 - DNA, 25 bp, Saccharomyces pastorianus
aagggcttatatcctggctcaacgt

SEQ ID NO: 181098 - DNA, 25 bp, Saccharomyces pastorianus
agattctagatcatctgtacccgct

SEQ ID NO: 181099 - DNA, 25 bp, Saccharomyces pastorianus
attggctccatgcacctcaagggtg

SEQ ID NO: 181100 - DNA, 25 bp, Saccharomyces pastorianus
gacttctctgctggtcatctagtta

SEQ ID NO: 181101 - DNA, 25 bp, Saccharomyces pastorianus
tgactctcaccatgatgacgttacc

SEQ ID NO: 181102 - DNA, 25 bp, Saccharomyces pastorianus
gggaattgacgctgctgtatacata

SEQ ID NO: 181103 - DNA, 25 bp, Saccharomyces pastorianus
aaggtcatcggtagcgacttctctg

SEQ ID NO: 181104 - DNA, 25 bp, Saccharomyces pastorianus
ggcgagcgaaactgcaatcaatgat

SEQ ID NO: 181105 - DNA, 25 bp, Saccharomyces pastorianus
tagcgcctctatcgacgcggtgaaa

SEQ ID NO: 181106 - DNA, 25 bp, Saccharomyces pastorianus
agattctcgtcatggtctattggcc

SEQ ID NO: 181107 - DNA, 25 bp, Saccharomyces pastorianus
ggtcatctagttagtagcgcctcta

SEQ ID NO: 181108 - DNA, 25 bp, Saccharomyces pastorianus
aaatttcatccttctgacgtcaata

SEQ ID NO: 181109 - DNA, 25 bp, Saccharomyces pastorianus
tattggcctgtggtaccgaattgca

SEQ ID NO: 181110 - DNA, 25 bp, Saccharomyces pastorianus
aaggacgaatgaccgcattgctcaa

SEQ ID NO: 181111 - DNA, 25 bp, Saccharomyces pastorianus
agtttgccgctctgtacttcggtgg

SEQ ID NO: 181112 - DNA, 25 bp, Saccharomyces pastorianus
aacaaattgaattcagggctccaaa

SEQ ID NO: 181113 - DNA, 25 bp, Saccharomyces pastorianus
agggcgagatgcagtttgccgctct

SEQ ID NO: 181114 - DNA, 25 bp, Saccharomyces pastorianus
gcgagatgcagtttgccgctctgta

SEQ ID NO: 181115 - DNA, 25 bp, Saccharomyces pastorianus
atcactgaaaagtacgagggcgaga

SEQ ID NO: 181116 - DNA, 25 bp, Saccharomyces pastorianus
tgaattcagggctccaaaagacgat

SEQ ID NO: 181117 - DNA, 25 bp, Saccharomyces pastorianus
gagatgcagtttgccgctctgtact

SEQ ID NO: 181118 - DNA, 25 bp, Saccharomyces pastorianus
tgtacttcggtggtaaacaaattga

SEQ ID NO: 181119 - DNA, 25 bp, Saccharomyces pastorianus
cgctctgtacttcggtggtaaacaa

SEQ ID NO: 181120 - DNA, 25 bp, Saccharomyces pastorianus
aaacatttagctatcactgaaaagt

SEQ ID NO: 181121 - DNA, 25 bp, Saccharomyces pastorianus
tgccgctctgtacttcggtggtaaa

SEQ ID NO: 181122 - DNA, 25 bp, Saccharomyces pastorianus
tgaaaaacttccagtttctcgagcg

SEQ ID NO: 181123 - DNA, 25 bp, Saccharomyces pastorianus
cctctacaacgaccgtatcgtcttt

SEQ ID NO: 181124 - DNA, 25 bp, Saccharomyces pastorianus
acttccagtttctcgagcgcctcta

SEQ ID NO: 181125 - DNA, 25 bp, Saccharomyces pastorianus
gctgaaaaacttccagtttctcgag

SEQ ID NO: 181126 - DNA, 25 bp, Saccharomyces pastorianus
tccagtttctcgagcgcctctacaa

SEQ ID NO: 181127 - DNA, 25 bp, Saccharomyces pastorianus
gagcgcctctacaacgaccgtatcg

SEQ ID NO: 181128 - DNA, 25 bp, Saccharomyces pastorianus
acgctgaaaaacttccagtttctcg

SEQ ID NO: 181129 - DNA, 25 bp, Saccharomyces pastorianus
aaacttccagtttctcgagcgcctc

SEQ ID NO: 181130 - DNA, 25 bp, Saccharomyces pastorianus
aaaacttccagtttctcgagcgcct

SEQ ID NO: 181131 - DNA, 25 bp, Saccharomyces pastorianus
agcgcctctacaacgaccgtatcgt

SEQ ID NO: 181132 - DNA, 25 bp, Saccharomyces pastorianus
tcgagcgcctctacaacgaccgtat

SEQ ID NO: 181133 - DNA, 25 bp, Saccharomyces pastorianus
tattatactagagattctcctcatg

SEQ ID NO: 181134 - DNA, 25 bp, Saccharomyces pastorianus
atatattatactagagattctcctc

SEQ ID NO: 181135 - DNA, 25 bp, Saccharomyces pastorianus
atattatactagagattctcctcat

SEQ ID NO: 181136 - DNA, 25 bp, Saccharomyces pastorianus
atatatattatactagagattctcc

SEQ ID NO: 181137 - DNA, 25 bp, Saccharomyces pastorianus
gatctttgggattccattatttctt

SEQ ID NO: 181138 - DNA, 25 bp, Saccharomyces pastorianus
tatattatactagagattctcctca

SEQ ID NO: 181139 - DNA, 25 bp, Saccharomyces pastorianus
tgggattccattatttcttaatgtt

SEQ ID NO: 181140 - DNA, 25 bp, Saccharomyces pastorianus
ctttgggattccattatttcttaat

SEQ ID NO: 181141 - DNA, 25 bp, Saccharomyces pastorianus
atctttgggattccattatttctta

SEQ ID NO: 181142 - DNA, 25 bp, Saccharomyces pastorianus
tctttgggattccattatttcttaa

SEQ ID NO: 181143 - DNA, 25 bp, Saccharomyces pastorianus
tatatattatactagagattctcct

SEQ ID NO: 181144 - DNA, 25 bp, Saccharomyces pastorianus
aaaggaccatttccgtgcatccgta

SEQ ID NO: 181145 - DNA, 25 bp, Saccharomyces pastorianus
atggcgcggttccaatcttcagaaa

SEQ ID NO: 181146 - DNA, 25 bp, Saccharomyces pastorianus
atctgcatgtgctgtgtgtgatggc

SEQ ID NO: 181147 - DNA, 25 bp, Saccharomyces pastorianus
gtgatggcaagctactggacgtgtt

SEQ ID NO: 181148 - DNA, 25 bp, Saccharomyces pastorianus
gaacgggctgttctatgcaatcggc

SEQ ID NO: 181149 - DNA, 25 bp, Saccharomyces pastorianus
agacaagctgttacctctgctggat

SEQ ID NO: 181150 - DNA, 25 bp, Saccharomyces pastorianus
taacacggtcgcattggaagccaaa

SEQ ID NO: 181151 - DNA, 25 bp, Saccharomyces pastorianus
ctgttattggtggtggcgattctgc

SEQ ID NO: 181152 - DNA, 25 bp, Saccharomyces pastorianus
ggacgctataattttggccaccggt

SEQ ID NO: 181153 - DNA, 25 bp, Saccharomyces pastorianus
atcatctctaacttctgtgccaggg

SEQ ID NO: 181154 - DNA, 25 bp, Saccharomyces pastorianus
gtacattaaaactgtgcccggatca

SEQ ID NO: 181155 - DNA, 25 bp, Saccharomyces pastorianus
ggcacactaacattgaatccataat

SEQ ID NO: 181156 - DNA, 25 bp, Saccharomyces pastorianus
ataggcacactaacattgaatccat

SEQ ID NO: 181157 - DNA, 25 bp, Saccharomyces pastorianus
gaataggcacactaacattgaatcc

SEQ ID NO: 181158 - DNA, 25 bp, Saccharomyces pastorianus
attcacgacctggttcatatcgacg

SEQ ID NO: 181159 - DNA, 25 bp, Saccharomyces pastorianus
taattcacgacctggttcatatcga

SEQ ID NO: 181160 - DNA, 25 bp, Saccharomyces pastorianus
atccataattcacgacctggttcat

SEQ ID NO: 181161 - DNA, 25 bp, Saccharomyces pastorianus
gaatccataattcacgacctggttc

SEQ ID NO: 181162 - DNA, 25 bp, Saccharomyces pastorianus
tcacgacctggttcatatcgacgag

SEQ ID NO: 181163 - DNA, 25 bp, Saccharomyces pastorianus
acgacctggttcatatcgacgagga

SEQ ID NO: 181164 - DNA, 25 bp, Saccharomyces pastorianus
ccataattcacgacctggttcatat

SEQ ID NO: 181165 - DNA, 25 bp, Saccharomyces pastorianus
ttgaatccataattcacgacctggt

SEQ ID NO: 181166 - DNA, 25 bp, Saccharomyces pastorianus
atttgcttattggtacagggtccac

SEQ ID NO: 181167 - DNA, 25 bp, Saccharomyces pastorianus
accagagttttctaccttcaatatg

SEQ ID NO: 181168 - DNA, 25 bp, Saccharomyces pastorianus
gagacttagtgacattgccttcatc

SEQ ID NO: 181169 - DNA, 25 bp, Saccharomyces pastorianus
atcactgcccttgattactgctggt

SEQ ID NO: 181170 - DNA, 25 bp, Saccharomyces pastorianus
taaatgctggtggtaatcccatagt

SEQ ID NO: 181171 - DNA, 25 bp, Saccharomyces pastorianus
gctactgatcaggttcatttgctta

SEQ ID NO: 181172 - DNA, 25 bp, Saccharomyces pastorianus
gatctacccataacacaaagtcgcc

SEQ ID NO: 181173 - DNA, 25 bp, Saccharomyces pastorianus
gcgaggagatcttttggcaatgcca

SEQ ID NO: 181174 - DNA, 25 bp, Saccharomyces pastorianus
atcccatagtagtgaatccctcgtc

SEQ ID NO: 181175 - DNA, 25 bp, Saccharomyces pastorianus
ttactgctggttttgctactgatca

SEQ ID NO: 181176 - DNA, 25 bp, Saccharomyces pastorianus
gggtccacggactcagtaagcgttt

SEQ ID NO: 181177 - DNA, 25 bp, Saccharomyces pastorianus
gagcctttgaacgagcatttagaaa

SEQ ID NO: 181178 - DNA, 25 bp, Saccharomyces pastorianus
cacctcatctggttgagctggttta

SEQ ID NO: 181179 - DNA, 25 bp, Saccharomyces pastorianus
ttaatcatttccgtaaagcccaggg

SEQ ID NO: 181180 - DNA, 25 bp, Saccharomyces pastorianus
gccgtcgcggtatcacagtacatgg

SEQ ID NO: 181181 - DNA, 25 bp, Saccharomyces pastorianus
gaatacttctactctacattgcgta

SEQ ID NO: 181182 - DNA, 25 bp, Saccharomyces pastorianus
atagagtttccggtacttgctaacg

SEQ ID NO: 181183 - DNA, 25 bp, Saccharomyces pastorianus
gcgcggctttatttacaacgtagga

SEQ ID NO: 181184 - DNA, 25 bp, Saccharomyces pastorianus
acggaaggatgtcacgccacctcat

SEQ ID NO: 181185 - DNA, 25 bp, Saccharomyces pastorianus
agttcaaaccattgtacactcattt

SEQ ID NO: 181186 - DNA, 25 bp, Saccharomyces pastorianus
atatacaatatttagccgtcgcggt

SEQ ID NO: 181187 - DNA, 25 bp, Saccharomyces pastorianus
ttgctaacggcaaaaggcgcggctt

SEQ ID NO: 181188 - DNA, 25 bp, Saccharomyces pastorianus
tcatgtccgtcatggtcgggaaaaa

SEQ ID NO: 181189 - DNA, 25 bp, Saccharomyces pastorianus
gtcatgtccgtcatggtcgggaaaa

SEQ ID NO: 181190 - DNA, 25 bp, Saccharomyces pastorianus
aattgtcatgtccgtcatggtcggg

SEQ ID NO: 181191 - DNA, 25 bp, Saccharomyces pastorianus
catgtccgtcatggtcgggaaaaat

SEQ ID NO: 181192 - DNA, 25 bp, Saccharomyces pastorianus
aaattgtcatgtccgtcatggtcgg

SEQ ID NO: 181193 - DNA, 25 bp, Saccharomyces pastorianus
tgtccgtcatggtcgggaaaaatgt

SEQ ID NO: 181194 - DNA, 25 bp, Saccharomyces pastorianus
aaaattgtcatgtccgtcatggtcg

SEQ ID NO: 181195 - DNA, 25 bp, Saccharomyces pastorianus
attgtcatgtccgtcatggtcggga

SEQ ID NO: 181196 - DNA, 25 bp, Saccharomyces pastorianus
aaaaattgtcatgtccgtcatggtc

SEQ ID NO: 181197 - DNA, 25 bp, Saccharomyces pastorianus
tgtcatgtccgtcatggtcgggaaa

SEQ ID NO: 181198 - DNA, 25 bp, Saccharomyces pastorianus
ttgtcatgtccgtcatggtcgggaa

SEQ ID NO: 181199 - DNA, 25 bp, Saccharomyces pastorianus
gagagtaatagattccgtccagtca

SEQ ID NO: 181200 - DNA, 25 bp, Saccharomyces pastorianus
gtgccaacgaggacgccaatacagg

SEQ ID NO: 181201 - DNA, 25 bp, Saccharomyces pastorianus
attccgtccagtcactgacattaat

SEQ ID NO: 181202 - DNA, 25 bp, Saccharomyces pastorianus
tacaggtggcaatgctgagagtaat

SEQ ID NO: 181203 - DNA, 25 bp, Saccharomyces pastorianus
catcttttccttgtatggatcgata

SEQ ID NO: 181204 - DNA, 25 bp, Saccharomyces pastorianus
aaacatcttttccttgtatggatcg

SEQ ID NO: 181205 - DNA, 25 bp, Saccharomyces pastorianus
gtaatagattccgtccagtcactga

SEQ ID NO: 181206 - DNA, 25 bp, Saccharomyces pastorianus
caccactgatagttccaacgtcagg

SEQ ID NO: 181207 - DNA, 25 bp, Saccharomyces pastorianus
cgaggacgccaatacaggtggcaat

SEQ ID NO: 181208 - DNA, 25 bp, Saccharomyces pastorianus
gtcactgacattaataaagagccat

SEQ ID NO: 181209 - DNA, 25 bp, Saccharomyces pastorianus
tgtatggatcgatatattcttctgt

SEQ ID NO: 181210 - DNA, 25 bp, Saccharomyces pastorianus
acaaagcatgcgagaggccctgggt

SEQ ID NO: 181211 - DNA, 25 bp, Saccharomyces pastorianus
caggaagacaaagcatgcgagaggc

SEQ ID NO: 181212 - DNA, 25 bp, Saccharomyces pastorianus
agctcgccccattataatttttcca

SEQ ID NO: 181213 - DNA, 25 bp, Saccharomyces pastorianus
ggaagacaaagcatgcgagaggccc

SEQ ID NO: 181214 - DNA, 25 bp, Saccharomyces pastorianus
agacaaagcatgcgagaggccctgg

SEQ ID NO: 181215 - DNA, 25 bp, Saccharomyces pastorianus
gacaaagcatgcgagaggccctggg

SEQ ID NO: 181216 - DNA, 25 bp, Saccharomyces pastorianus
gagaggccctgggttcaattcccag

SEQ ID NO: 181217 - DNA, 25 bp, Saccharomyces pastorianus
gaagacaaagcatgcgagaggccct

SEQ ID NO: 181218 - DNA, 25 bp, Saccharomyces pastorianus
cagctcgccccattataatttttcc

SEQ ID NO: 181219 - DNA, 25 bp, Saccharomyces pastorianus
aagacaaagcatgcgagaggccctg

SEQ ID NO: 181220 - DNA, 25 bp, Saccharomyces pastorianus
aaagcatgcgagaggccctgggttc

SEQ ID NO: 181221 - DNA, 25 bp, Saccharomyces pastorianus
aaacataccttacctgcttagaaag

SEQ ID NO: 181222 - DNA, 25 bp, Saccharomyces pastorianus
tctacgcaaggtttttccagttaat

SEQ ID NO: 181223 - DNA, 25 bp, Saccharomyces pastorianus
gcggtggagataatttggcttcttc

SEQ ID NO: 181224 - DNA, 25 bp, Saccharomyces pastorianus
agaataccttctatcgcagaccaat

SEQ ID NO: 181225 - DNA, 25 bp, Saccharomyces pastorianus
gggttatatctaactcagcttatac

SEQ ID NO: 181226 - DNA, 25 bp, Saccharomyces pastorianus
cagcttatactgaacgcgggtttgt

SEQ ID NO: 181227 - DNA, 25 bp, Saccharomyces pastorianus
atcacccagcttgccgttattaatg

SEQ ID NO: 181228 - DNA, 25 bp, Saccharomyces pastorianus
gggatgcagccgatttgaaaacatt

SEQ ID NO: 181229 - DNA, 25 bp, Saccharomyces pastorianus
tgcgctaagagctttatcacatact

SEQ ID NO: 181230 - DNA, 25 bp, Saccharomyces pastorianus
ccagttaatgcaatcacccagcttg

SEQ ID NO: 181231 - DNA, 25 bp, Saccharomyces pastorianus
tttgcaaatgcatctgacggatatt

SEQ ID NO: 181232 - DNA, 25 bp, Saccharomyces pastorianus
ccttgatgatttttgaccgtgctat

SEQ ID NO: 181233 - DNA, 25 bp, Saccharomyces pastorianus
cacatattttgctggctgctgttat

SEQ ID NO: 181234 - DNA, 25 bp, Saccharomyces pastorianus
attggtcacacgctttttacacata

SEQ ID NO: 181235 - DNA, 25 bp, Saccharomyces pastorianus
tgttttactatgatggacctttcca

SEQ ID NO: 181236 - DNA, 25 bp, Saccharomyces pastorianus
gaagagatggatggccctacgttgt

SEQ ID NO: 181237 - DNA, 25 bp, Saccharomyces pastorianus
ggacctttccaattcactgacgatg

SEQ ID NO: 181238 - DNA, 25 bp, Saccharomyces pastorianus
tgtgatatcactattaccacccgct

SEQ ID NO: 181239 - DNA, 25 bp, Saccharomyces pastorianus
gcggtcctatctgtggttggattca

SEQ ID NO: 181240 - DNA, 25 bp, Saccharomyces pastorianus
caatcaagagcgctatttcccaata

SEQ ID NO: 181241 - DNA, 25 bp, Saccharomyces pastorianus
cctacgttgttgcatcctgggaaaa

SEQ ID NO: 181242 - DNA, 25 bp, Saccharomyces pastorianus
ggtttgttagccctgatgttttact

SEQ ID NO: 181243 - DNA, 25 bp, Saccharomyces pastorianus
cattaattattgaaccaaaaccaag

SEQ ID NO: 181244 - DNA, 25 bp, Saccharomyces pastorianus
gaaaaacatccactaagaaagacag

SEQ ID NO: 181245 - DNA, 25 bp, Saccharomyces pastorianus
gaaacaataccaactatcattaatt

SEQ ID NO: 181246 - DNA, 25 bp, Saccharomyces pastorianus
gaaagtcgttccgaattccaattcg

SEQ ID NO: 181247 - DNA, 25 bp, Saccharomyces pastorianus
aatccagggatgaccaaaccgatga

SEQ ID NO: 181248 - DNA, 25 bp, Saccharomyces pastorianus
aaaatccagggatgaccaaaccgat

SEQ ID NO: 181249 - DNA, 25 bp, Saccharomyces pastorianus
agacagattttcaaaattccaatta

SEQ ID NO: 181250 - DNA, 25 bp, Saccharomyces pastorianus
ataaatcacaagaaaaatccaggga

SEQ ID NO: 181251 - DNA, 25 bp, Saccharomyces pastorianus
gaccaaaccgatgaaggaaaaacat

SEQ ID NO: 181252 - DNA, 25 bp, Saccharomyces pastorianus
acatccactaagaaagacagatttt

SEQ ID NO: 181253 - DNA, 25 bp, Saccharomyces pastorianus
aacatcccccatattgagaaacaat

SEQ ID NO: 181254 - DNA, 25 bp, Saccharomyces pastorianus
tactttagtggctatccagctgagc

SEQ ID NO: 181255 - DNA, 25 bp, Saccharomyces pastorianus
cttgaacgcctctccattaaagttt

SEQ ID NO: 181256 - DNA, 25 bp, Saccharomyces pastorianus
cttggctaacgggtatcatgctgtt

SEQ ID NO: 181257 - DNA, 25 bp, Saccharomyces pastorianus
ggttcatgttccttccattgagaac

SEQ ID NO: 181258 - DNA, 25 bp, Saccharomyces pastorianus
acattattatctttggtggccaagc

SEQ ID NO: 181259 - DNA, 25 bp, Saccharomyces pastorianus
agtctttgaactcttcttcttcatg

SEQ ID NO: 181260 - DNA, 25 bp, Saccharomyces pastorianus
ttgtttttgcacacttaccatcacg

SEQ ID NO: 181261 - DNA, 25 bp, Saccharomyces pastorianus
ccagctgagcaattcgagtttattc

SEQ ID NO: 181262 - DNA, 25 bp, Saccharomyces pastorianus
ttgccgaccagttccagtctttgaa

SEQ ID NO: 181263 - DNA, 25 bp, Saccharomyces pastorianus
tcacaacggtctattctggtctatc

SEQ ID NO: 181264 - DNA, 25 bp, Saccharomyces pastorianus
ggttcctatggtttatcacaacggt

SEQ ID NO: 181265 - DNA, 25 bp, Saccharomyces pastorianus
acgagaagacatggccttggtgaca

SEQ ID NO: 181266 - DNA, 25 bp, Saccharomyces pastorianus
aagacatggccttggtgacaactct

SEQ ID NO: 181267 - DNA, 25 bp, Saccharomyces pastorianus
gacatggccttggtgacaactctct

SEQ ID NO: 181268 - DNA, 25 bp, Saccharomyces pastorianus
acatggccttggtgacaactctctt

SEQ ID NO: 181269 - DNA, 25 bp, Saccharomyces pastorianus
tgacaactctcttcaaaccaacttc

SEQ ID NO: 181270 - DNA, 25 bp, Saccharomyces pastorianus
atggccttggtgacaactctcttca

SEQ ID NO: 181271 - DNA, 25 bp, Saccharomyces pastorianus
agaagacatggccttggtgacaact

SEQ ID NO: 181272 - DNA, 25 bp, Saccharomyces pastorianus
gtgacaactctcttcaaaccaactt

SEQ ID NO: 181273 - DNA, 25 bp, Saccharomyces pastorianus
gaagacatggccttggtgacaactc

SEQ ID NO: 181274 - DNA, 25 bp, Saccharomyces pastorianus
aacgagaagacatggccttggtgac

SEQ ID NO: 181275 - DNA, 25 bp, Saccharomyces pastorianus
agacatggccttggtgacaactctc

SEQ ID NO: 181276 - DNA, 25 bp, Saccharomyces pastorianus
ggaagtttgccctttagcattaaga

SEQ ID NO: 181277 - DNA, 25 bp, Saccharomyces pastorianus
aggcgccgagaaggacattcaagtt

SEQ ID NO: 181278 - DNA, 25 bp, Saccharomyces pastorianus
ggcctgctcctttaatgatcggtat

SEQ ID NO: 181279 - DNA, 25 bp, Saccharomyces pastorianus
aatcttcgcctctggtattatgaaa

SEQ ID NO: 181280 - DNA, 25 bp, Saccharomyces pastorianus
ttacaatggatttggcctgctcctt

SEQ ID NO: 181281 - DNA, 25 bp, Saccharomyces pastorianus
gaattttgagtggtaaaggcgccga

SEQ ID NO: 181282 - DNA, 25 bp, Saccharomyces pastorianus
gcacttggtttgttaactgcttata

SEQ ID NO: 181283 - DNA, 25 bp, Saccharomyces pastorianus
gggtcgctgaggcaagaaaatcttt

SEQ ID NO: 181284 - DNA, 25 bp, Saccharomyces pastorianus
atatctttatcctctactactgtaa

SEQ ID NO: 181285 - DNA, 25 bp, Saccharomyces pastorianus
tatgcttcggaagtttgccctttag

SEQ ID NO: 181286 - DNA, 25 bp, Saccharomyces pastorianus
ttatttggtcaaatcttcgcctctg

SEQ ID NO: 181287 - DNA, 25 bp, Saccharomyces pastorianus
gcaagccgtccatttcttagtaata

SEQ ID NO: 181288 - DNA, 25 bp, Saccharomyces pastorianus
aagccgtccatttcttagtaataag

SEQ ID NO: 181289 - DNA, 25 bp, Saccharomyces pastorianus
caagcaagccgtccatttcttagta

SEQ ID NO: 181290 - DNA, 25 bp, Saccharomyces pastorianus
caagccgtccatttcttagtaataa

SEQ ID NO: 181291 - DNA, 25 bp, Saccharomyces pastorianus
acaagcaagccgtccatttcttagt

SEQ ID NO: 181292 - DNA, 25 bp, Saccharomyces pastorianus
agcaagccgtccatttcttagtaat

SEQ ID NO: 181293 - DNA, 25 bp, Saccharomyces pastorianus
tacaagcaagccgtccatttcttag

SEQ ID NO: 181294 - DNA, 25 bp, Saccharomyces pastorianus
cagtacaagcaagccgtccatttct

SEQ ID NO: 181295 - DNA, 25 bp, Saccharomyces pastorianus
aagcaagccgtccatttcttagtaa

SEQ ID NO: 181296 - DNA, 25 bp, Saccharomyces pastorianus
acagtacaagcaagccgtccatttc

SEQ ID NO: 181297 - DNA, 25 bp, Saccharomyces pastorianus
agccgtccatttcttagtaataaga

SEQ ID NO: 181298 - DNA, 25 bp, Saccharomyces pastorianus
atctattacattatgggtggtatgt

SEQ ID NO: 181299 - DNA, 25 bp, Saccharomyces pastorianus
ctattacattatgggtggtatgttg

SEQ ID NO: 181300 - DNA, 25 bp, Saccharomyces pastorianus
cattatgggtggtatgttggaataa

SEQ ID NO: 181301 - DNA, 25 bp, Saccharomyces pastorianus
tctattacattatgggtggtatgtt

SEQ ID NO: 181302 - DNA, 25 bp, Saccharomyces pastorianus
cattagatctattacattatgggtg

SEQ ID NO: 181303 - DNA, 25 bp, Saccharomyces pastorianus
ttagatctattacattatgggtggt

SEQ ID NO: 181304 - DNA, 25 bp, Saccharomyces pastorianus
attatgggtggtatgttggaataaa

SEQ ID NO: 181305 - DNA, 25 bp, Saccharomyces pastorianus
tcattagatctattacattatgggt

SEQ ID NO: 181306 - DNA, 25 bp, Saccharomyces pastorianus
gatctattacattatgggtggtatg

SEQ ID NO: 181307 - DNA, 25 bp, Saccharomyces pastorianus
ttcattagatctattacattatggg

SEQ ID NO: 181308 - DNA, 25 bp, Saccharomyces pastorianus
attagatctattacattatgggtgg

SEQ ID NO: 181309 - DNA, 25 bp, Saccharomyces pastorianus
gcataggaagccaagaaactagaaa

SEQ ID NO: 181310 - DNA, 25 bp, Saccharomyces pastorianus
cataggaagccaagaaactagaaaa

SEQ ID NO: 181311 - DNA, 25 bp, Saccharomyces pastorianus
aagaaataaagattgcagcacctga

SEQ ID NO: 181312 - DNA, 25 bp, Saccharomyces pastorianus
aaaagaaataaagattgcagcacct

SEQ ID NO: 181313 - DNA, 25 bp, Saccharomyces pastorianus
tttagcataggaagccaagaaacta

SEQ ID NO: 181314 - DNA, 25 bp, Saccharomyces pastorianus
atttagcataggaagccaagaaact

SEQ ID NO: 181315 - DNA, 25 bp, Saccharomyces pastorianus
gatttagcataggaagccaagaaac

SEQ ID NO: 181316 - DNA, 25 bp, Saccharomyces pastorianus
ggatttagcataggaagccaagaaa

SEQ ID NO: 181317 - DNA, 25 bp, Saccharomyces pastorianus
tagcataggaagccaagaaactaga

SEQ ID NO: 181318 - DNA, 25 bp, Saccharomyces pastorianus
agcataggaagccaagaaactagaa

SEQ ID NO: 181319 - DNA, 25 bp, Saccharomyces pastorianus
ttagcataggaagccaagaaactag

SEQ ID NO: 181320 - DNA, 25 bp, Saccharomyces pastorianus
cattcacaacgatctttgcagcaac

SEQ ID NO: 181321 - DNA, 25 bp, Saccharomyces pastorianus
tcacaacgatctttgcagcaacaac

SEQ ID NO: 181322 - DNA, 25 bp, Saccharomyces pastorianus
attcacaacgatctttgcagcaaca

SEQ ID NO: 181323 - DNA, 25 bp, Saccharomyces pastorianus
taaccattcacaacgatctttgcag

SEQ ID NO: 181324 - DNA, 25 bp, Saccharomyces pastorianus
caacgatctttgcagcaacaacagc

SEQ ID NO: 181325 - DNA, 25 bp, Saccharomyces pastorianus
ccattcacaacgatctttgcagcaa

SEQ ID NO: 181326 - DNA, 25 bp, Saccharomyces pastorianus
accattcacaacgatctttgcagca

SEQ ID NO: 181327 - DNA, 25 bp, Saccharomyces pastorianus
ttcacaacgatctttgcagcaacaa

SEQ ID NO: 181328 - DNA, 25 bp, Saccharomyces pastorianus
ctaaccattcacaacgatctttgca

SEQ ID NO: 181329 - DNA, 25 bp, Saccharomyces pastorianus
acaacgatctttgcagcaacaacag

SEQ ID NO: 181330 - DNA, 25 bp, Saccharomyces pastorianus
aaccattcacaacgatctttgcagc

SEQ ID NO: 181331 - DNA, 25 bp, Saccharomyces pastorianus
catgcaaatcgttcttttgttctga

SEQ ID NO: 181332 - DNA, 25 bp, Saccharomyces pastorianus
agaatcccttaatctattgctaaaa

SEQ ID NO: 181333 - DNA, 25 bp, Saccharomyces pastorianus
cttcagtaatggtcacactgccctt

SEQ ID NO: 181334 - DNA, 25 bp, Saccharomyces pastorianus
gcagctttcacattcactttctgaa

SEQ ID NO: 181335 - DNA, 25 bp, Saccharomyces pastorianus
atttagcttcttttcagacgcggca

SEQ ID NO: 181336 - DNA, 25 bp, Saccharomyces pastorianus
agcttgatatgcgaccctttattaa

SEQ ID NO: 181337 - DNA, 25 bp, Saccharomyces pastorianus
agacgcggcaagtccttcagtaatg

SEQ ID NO: 181338 - DNA, 25 bp, Saccharomyces pastorianus
tgaaaactcccctcatttagattac

SEQ ID NO: 181339 - DNA, 25 bp, Saccharomyces pastorianus
cagctgctcagttgggatgggtaat

SEQ ID NO: 181340 - DNA, 25 bp, Saccharomyces pastorianus
tgatgtggatgctgcgcagctttca

SEQ ID NO: 181341 - DNA, 25 bp, Saccharomyces pastorianus
gattaccaccaaccagtaaacagtt

SEQ ID NO: 181342 - DNA, 25 bp, Saccharomyces pastorianus
ggagaacttctagtactttctacat

SEQ ID NO: 181343 - DNA, 25 bp, Saccharomyces pastorianus
tattattgccttattaaaaatggaa

SEQ ID NO: 181344 - DNA, 25 bp, Saccharomyces pastorianus
tgccttattaaaaatggaatcccaa

SEQ ID NO: 181345 - DNA, 25 bp, Saccharomyces pastorianus
tattgccttattaaaaatggaatcc

SEQ ID NO: 181346 - DNA, 25 bp, Saccharomyces pastorianus
tctagtactttctacatacctaata

SEQ ID NO: 181347 - DNA, 25 bp, Saccharomyces pastorianus
atattattgccttattaaaaatgga

SEQ ID NO: 181348 - DNA, 25 bp, Saccharomyces pastorianus
ttattgccttattaaaaatggaatc

SEQ ID NO: 181349 - DNA, 25 bp, Saccharomyces pastorianus
aacttctagtactttctacatacct

SEQ ID NO: 181350 - DNA, 25 bp, Saccharomyces pastorianus
attattgccttattaaaaatggaat

SEQ ID NO: 181351 - DNA, 25 bp, Saccharomyces pastorianus
cttttatggattcctaaatcctcga

SEQ ID NO: 181352 - DNA, 25 bp, Saccharomyces pastorianus
ttgccttattaaaaatggaatccca

SEQ ID NO: 181353 - DNA, 25 bp, Saccharomyces pastorianus
aattggcaagcatctcacaaaggga

SEQ ID NO: 181354 - DNA, 25 bp, Saccharomyces pastorianus
gagcttttataccactcatggagat

SEQ ID NO: 181355 - DNA, 25 bp, Saccharomyces pastorianus
caaagctatttggtgcagtgaaaaa

SEQ ID NO: 181356 - DNA, 25 bp, Saccharomyces pastorianus
gcggtatcggcagtacgtttagttt

SEQ ID NO: 181357 - DNA, 25 bp, Saccharomyces pastorianus
ttaagagacgccagcggtatcggca

SEQ ID NO: 181358 - DNA, 25 bp, Saccharomyces pastorianus
cgctgccttttcagttggtcttata

SEQ ID NO: 181359 - DNA, 25 bp, Saccharomyces pastorianus
ccatgcttttggatactacaggaga

SEQ ID NO: 181360 - DNA, 25 bp, Saccharomyces pastorianus
gaaatattgttttaccgctgccttt

SEQ ID NO: 181361 - DNA, 25 bp, Saccharomyces pastorianus
gaccatgatcgggacgttcaatatc

SEQ ID NO: 181362 - DNA, 25 bp, Saccharomyces pastorianus
gcgtcgttacatgagcttttatacc

SEQ ID NO: 181363 - DNA, 25 bp, Saccharomyces pastorianus
gaatagacattcttcatgctggtaa

SEQ ID NO: 181364 - DNA, 25 bp, Saccharomyces pastorianus
ttattgagctcattcaaggcgtagg

SEQ ID NO: 181365 - DNA, 25 bp, Saccharomyces pastorianus
gagctcattcaaggcgtagggagac

SEQ ID NO: 181366 - DNA, 25 bp, Saccharomyces pastorianus
aggcgtagggagactaagagatggg

SEQ ID NO: 181367 - DNA, 25 bp, Saccharomyces pastorianus
ttgagctcattcaaggcgtagggag

SEQ ID NO: 181368 - DNA, 25 bp, Saccharomyces pastorianus
catattattgagctcattcaaggcg

SEQ ID NO: 181369 - DNA, 25 bp, Saccharomyces pastorianus
cctctgttatctattatctagaaaa

SEQ ID NO: 181370 - DNA, 25 bp, Saccharomyces pastorianus
ctcattcaaggcgtagggagactaa

SEQ ID NO: 181371 - DNA, 25 bp, Saccharomyces pastorianus
attgagctcattcaaggcgtaggga

SEQ ID NO: 181372 - DNA, 25 bp, Saccharomyces pastorianus
cattcaaggcgtagggagactaaga

SEQ ID NO: 181373 - DNA, 25 bp, Saccharomyces pastorianus
tattgagctcattcaaggcgtaggg

SEQ ID NO: 181374 - DNA, 25 bp, Saccharomyces pastorianus
gggcctctgttatctattatctaga

SEQ ID NO: 181375 - DNA, 25 bp, Saccharomyces pastorianus
aatattctatgattccaagggcggt

SEQ ID NO: 181376 - DNA, 25 bp, Saccharomyces pastorianus
gcgcccaagtcgttttgcattgtat

SEQ ID NO: 181377 - DNA, 25 bp, Saccharomyces pastorianus
tgcattgtattctaggtcactcgga

SEQ ID NO: 181378 - DNA, 25 bp, Saccharomyces pastorianus
atgcagcgatggatgtcctgactgt

SEQ ID NO: 181379 - DNA, 25 bp, Saccharomyces pastorianus
taagtacgggtctggcttgtgtgtt

SEQ ID NO: 181380 - DNA, 25 bp, Saccharomyces pastorianus
aagcgaccagctagattaatattct

SEQ ID NO: 181381 - DNA, 25 bp, Saccharomyces pastorianus
gtatgttaccgcgatttatagtggc

SEQ ID NO: 181382 - DNA, 25 bp, Saccharomyces pastorianus
ggtccagagccaaatatgccagaga

SEQ ID NO: 181383 - DNA, 25 bp, Saccharomyces pastorianus
gagactgttattcctgtgtcagagc

SEQ ID NO: 181384 - DNA, 25 bp, Saccharomyces pastorianus
gaatagaagaatgcccatgcagcga

SEQ ID NO: 181385 - DNA, 25 bp, Saccharomyces pastorianus
ggaaaacagcctggtcctgtcgaaa

SEQ ID NO: 181386 - DNA, 25 bp, Saccharomyces pastorianus
tatatatctgagagagtttacggtg

SEQ ID NO: 181387 - DNA, 25 bp, Saccharomyces pastorianus
gcagcagactccttcttttctgtta

SEQ ID NO: 181388 - DNA, 25 bp, Saccharomyces pastorianus
cagactccttcttttctgttatgct

SEQ ID NO: 181389 - DNA, 25 bp, Saccharomyces pastorianus
acggcaatgctaacgactggtccat

SEQ ID NO: 181390 - DNA, 25 bp, Saccharomyces pastorianus
gatctttactttgtctgttcttcca

SEQ ID NO: 181391 - DNA, 25 bp, Saccharomyces pastorianus
taacgactggtccattgtctaccgc

SEQ ID NO: 181392 - DNA, 25 bp, Saccharomyces pastorianus
ggtccattgtctaccgcagcagact

SEQ ID NO: 181393 - DNA, 25 bp, Saccharomyces pastorianus
gcacaaatatgcgatgtacatgcta

SEQ ID NO: 181394 - DNA, 25 bp, Saccharomyces pastorianus
ttgtctgttcttccattagccacga

SEQ ID NO: 181395 - DNA, 25 bp, Saccharomyces pastorianus
ttccattagccacgacggcaatgct

SEQ ID NO: 181396 - DNA, 25 bp, Saccharomyces pastorianus
ggaattcaattcttgtatcacagat

SEQ ID NO: 181397 - DNA, 25 bp, Saccharomyces pastorianus
ttatcaaactgagccttgcatgcaa

SEQ ID NO: 181398 - DNA, 25 bp, Saccharomyces pastorianus
atcaaactgagccttgcatgcaaag

SEQ ID NO: 181399 - DNA, 25 bp, Saccharomyces pastorianus
gcatgcaaagtaaaagccgcggaca

SEQ ID NO: 181400 - DNA, 25 bp, Saccharomyces pastorianus
catgcaaagtaaaagccgcggacat

SEQ ID NO: 181401 - DNA, 25 bp, Saccharomyces pastorianus
ggttatcaaactgagccttgcatgc

SEQ ID NO: 181402 - DNA, 25 bp, Saccharomyces pastorianus
cttgcatgcaaagtaaaagccgcgg

SEQ ID NO: 181403 - DNA, 25 bp, Saccharomyces pastorianus
gccttgcatgcaaagtaaaagccgc

SEQ ID NO: 181404 - DNA, 25 bp, Saccharomyces pastorianus
tgagccttgcatgcaaagtaaaagc

SEQ ID NO: 181405 - DNA, 25 bp, Saccharomyces pastorianus
ttgcatgcaaagtaaaagccgcgga

SEQ ID NO: 181406 - DNA, 25 bp, Saccharomyces pastorianus
aactgagccttgcatgcaaagtaaa

SEQ ID NO: 181407 - DNA, 25 bp, Saccharomyces pastorianus
actgagccttgcatgcaaagtaaaa

SEQ ID NO: 181408 - DNA, 25 bp, Saccharomyces pastorianus
tggtgtggctggctaactcttccct

SEQ ID NO: 181409 - DNA, 25 bp, Saccharomyces pastorianus
acgacttggtgtggctggctaactc

SEQ ID NO: 181410 - DNA, 25 bp, Saccharomyces pastorianus
acttggtgtggctggctaactcttc

SEQ ID NO: 181411 - DNA, 25 bp, Saccharomyces pastorianus
cttatacgacttggtgtggctggct

SEQ ID NO: 181412 - DNA, 25 bp, Saccharomyces pastorianus
tacgacttggtgtggctggctaact

SEQ ID NO: 181413 - DNA, 25 bp, Saccharomyces pastorianus
tgtggctggctaactcttccctgtt

SEQ ID NO: 181414 - DNA, 25 bp, Saccharomyces pastorianus
ttatacgacttggtgtggctggcta

SEQ ID NO: 181415 - DNA, 25 bp, Saccharomyces pastorianus
cttggtgtggctggctaactcttcc

SEQ ID NO: 181416 - DNA, 25 bp, Saccharomyces pastorianus
atacgacttggtgtggctggctaac

SEQ ID NO: 181417 - DNA, 25 bp, Saccharomyces pastorianus
tggctaactcttccctgttcccttt

SEQ ID NO: 181418 - DNA, 25 bp, Saccharomyces pastorianus
gacttggtgtggctggctaactctt

SEQ ID NO: 181419 - DNA, 25 bp, Saccharomyces pastorianus
tcgaagtaaaggagctacgcactct

SEQ ID NO: 181420 - DNA, 25 bp, Saccharomyces pastorianus
ggagctacgcactctataccaccag

SEQ ID NO: 181421 - DNA, 25 bp, Saccharomyces pastorianus
aaggagctacgcactctataccacc

SEQ ID NO: 181422 - DNA, 25 bp, Saccharomyces pastorianus
gtaaaggagctacgcactctatacc

SEQ ID NO: 181423 - DNA, 25 bp, Saccharomyces pastorianus
cgaagtaaaggagctacgcactcta

SEQ ID NO: 181424 - DNA, 25 bp, Saccharomyces pastorianus
acgcactctataccaccagtaccac

SEQ ID NO: 181425 - DNA, 25 bp, Saccharomyces pastorianus
agctacgcactctataccaccagta

SEQ ID NO: 181426 - DNA, 25 bp, Saccharomyces pastorianus
agtaaaggagctacgcactctatac

SEQ ID NO: 181427 - DNA, 25 bp, Saccharomyces pastorianus
gagctacgcactctataccaccagt

SEQ ID NO: 181428 - DNA, 25 bp, Saccharomyces pastorianus
tacgcactctataccaccagtacca

SEQ ID NO: 181429 - DNA, 25 bp, Saccharomyces pastorianus
aggagctacgcactctataccacca

SEQ ID NO: 181430 - DNA, 25 bp, Saccharomyces pastorianus
tggttagtttttgtcttcaggctgc

SEQ ID NO: 181431 - DNA, 25 bp, Saccharomyces pastorianus
gaatatttcatctacgtctttgacg

SEQ ID NO: 181432 - DNA, 25 bp, Saccharomyces pastorianus
tcgtttcctctcgttttgggactag

SEQ ID NO: 181433 - DNA, 25 bp, Saccharomyces pastorianus
gagcagtatcatcgtctaacacaaa

SEQ ID NO: 181434 - DNA, 25 bp, Saccharomyces pastorianus
attactgcgggcctggttattcaaa

SEQ ID NO: 181435 - DNA, 25 bp, Saccharomyces pastorianus
ggagatagcgccgtacgtcatacaa

SEQ ID NO: 181436 - DNA, 25 bp, Saccharomyces pastorianus
atacagtgttgcgagggtttgcccc

SEQ ID NO: 181437 - DNA, 25 bp, Saccharomyces pastorianus
gcctatgcttttagctgccattgta

SEQ ID NO: 181438 - DNA, 25 bp, Saccharomyces pastorianus
agcagtgctgctgttaattgcgcct

SEQ ID NO: 181439 - DNA, 25 bp, Saccharomyces pastorianus
gtgaatcccttatgatcgtttcctc

SEQ ID NO: 181440 - DNA, 25 bp, Saccharomyces pastorianus
gaccggttcgaatcttattactgcg

SEQ ID NO: 181441 - DNA, 25 bp, Saccharomyces pastorianus
gcgccgctgaatgcaactcgataga

SEQ ID NO: 181442 - DNA, 25 bp, Saccharomyces pastorianus
gtatggccaaggtccagcaacactg

SEQ ID NO: 181443 - DNA, 25 bp, Saccharomyces pastorianus
aactgagtttgatcttgcccatctt

SEQ ID NO: 181444 - DNA, 25 bp, Saccharomyces pastorianus
attagtttccacaacgctgatccaa

SEQ ID NO: 181445 - DNA, 25 bp, Saccharomyces pastorianus
cattctcgggtctttttatgcccta

SEQ ID NO: 181446 - DNA, 25 bp, Saccharomyces pastorianus
atcgctataccctgattatgtcgtt

SEQ ID NO: 181447 - DNA, 25 bp, Saccharomyces pastorianus
atgccgctcatgactgctttgaaaa

SEQ ID NO: 181448 - DNA, 25 bp, Saccharomyces pastorianus
atcttgcccatcttgggtatggcca

SEQ ID NO: 181449 - DNA, 25 bp, Saccharomyces pastorianus
tatgtcgttaatgctcctgactgcc

SEQ ID NO: 181450 - DNA, 25 bp, Saccharomyces pastorianus
aagaaggctatgacaccgccattct

SEQ ID NO: 181451 - DNA, 25 bp, Saccharomyces pastorianus
tatactcgacactgtgcaggatgct

SEQ ID NO: 181452 - DNA, 25 bp, Saccharomyces pastorianus
ggtcaggaaagaagttgactacaaa

SEQ ID NO: 181453 - DNA, 25 bp, Saccharomyces pastorianus
caggaaagaagttgactacaaagac

SEQ ID NO: 181454 - DNA, 25 bp, Saccharomyces pastorianus
attgagggtcaggaaagaagttgac

SEQ ID NO: 181455 - DNA, 25 bp, Saccharomyces pastorianus
aattgagggtcaggaaagaagttga

SEQ ID NO: 181456 - DNA, 25 bp, Saccharomyces pastorianus
agggtcaggaaagaagttgactaca

SEQ ID NO: 181457 - DNA, 25 bp, Saccharomyces pastorianus
tcaggaaagaagttgactacaaaga

SEQ ID NO: 181458 - DNA, 25 bp, Saccharomyces pastorianus
gagggtcaggaaagaagttgactac

SEQ ID NO: 181459 - DNA, 25 bp, Saccharomyces pastorianus
ttgagggtcaggaaagaagttgact

SEQ ID NO: 181460 - DNA, 25 bp, Saccharomyces pastorianus
agaaattgagggtcaggaaagaagt

SEQ ID NO: 181461 - DNA, 25 bp, Saccharomyces pastorianus
gtcaggaaagaagttgactacaaag

SEQ ID NO: 181462 - DNA, 25 bp, Saccharomyces pastorianus
gggtcaggaaagaagttgactacaa

SEQ ID NO: 181463 - DNA, 25 bp, Saccharomyces pastorianus
tttgattcttactcactttctgcag

SEQ ID NO: 181464 - DNA, 25 bp, Saccharomyces pastorianus
ttaacagcggtgatgatggccattt

SEQ ID NO: 181465 - DNA, 25 bp, Saccharomyces pastorianus
tttggcaaacctctcttaacagcgg

SEQ ID NO: 181466 - DNA, 25 bp, Saccharomyces pastorianus
gatatatggattcccatttttggaa

SEQ ID NO: 181467 - DNA, 25 bp, Saccharomyces pastorianus
tcccatttttggaaggtggagtaat

SEQ ID NO: 181468 - DNA, 25 bp, Saccharomyces pastorianus
aagtagcagtcgttgaagtaccggc

SEQ ID NO: 181469 - DNA, 25 bp, Saccharomyces pastorianus
gaagtaccggctgctactgaagtag

SEQ ID NO: 181470 - DNA, 25 bp, Saccharomyces pastorianus
ggtgatgatggccatttttgcttat

SEQ ID NO: 181471 - DNA, 25 bp, Saccharomyces pastorianus
ggcaacagatgttatagaactgact

SEQ ID NO: 181472 - DNA, 25 bp, Saccharomyces pastorianus
ggccatttttgcttatatttttgat

SEQ ID NO: 181473 - DNA, 25 bp, Saccharomyces pastorianus
cagcggatgtggttaactttggcaa

SEQ ID NO: 181474 - DNA, 25 bp, Saccharomyces pastorianus
cagcgattgaagttaatttgaccat

SEQ ID NO: 181475 - DNA, 25 bp, Saccharomyces pastorianus
gctgatgtaatcttaacaagaaata

SEQ ID NO: 181476 - DNA, 25 bp, Saccharomyces pastorianus
gatgtaatcttaacaagaaatagtg

SEQ ID NO: 181477 - DNA, 25 bp, Saccharomyces pastorianus
tagtgctgatgtaatcttaacaaga

SEQ ID NO: 181478 - DNA, 25 bp, Saccharomyces pastorianus
tgctgatgtaatcttaacaagaaat

SEQ ID NO: 181479 - DNA, 25 bp, Saccharomyces pastorianus
ctgatgtaatcttaacaagaaatag

SEQ ID NO: 181480 - DNA, 25 bp, Saccharomyces pastorianus
ttagtgctgatgtaatcttaacaag

SEQ ID NO: 181481 - DNA, 25 bp, Saccharomyces pastorianus
ccagcagcgattgaagttaatttga

SEQ ID NO: 181482 - DNA, 25 bp, Saccharomyces pastorianus
agtgctgatgtaatcttaacaagaa

SEQ ID NO: 181483 - DNA, 25 bp, Saccharomyces pastorianus
gtgctgatgtaatcttaacaagaaa

SEQ ID NO: 181484 - DNA, 25 bp, Saccharomyces pastorianus
gttagtgctgatgtaatcttaacaa

SEQ ID NO: 181485 - DNA, 25 bp, Saccharomyces pastorianus
acgcataatcgcatgtacacacttt

SEQ ID NO: 181486 - DNA, 25 bp, Saccharomyces pastorianus
agcaatgtggaaatctgaccgaaaa

SEQ ID NO: 181487 - DNA, 25 bp, Saccharomyces pastorianus
taacgagaatgtactcacagagcat

SEQ ID NO: 181488 - DNA, 25 bp, Saccharomyces pastorianus
agaggtgatgacgtagttcagcaat

SEQ ID NO: 181489 - DNA, 25 bp, Saccharomyces pastorianus
atcttttagaaacagcacatgtcgg

SEQ ID NO: 181490 - DNA, 25 bp, Saccharomyces pastorianus
aactacaacaacttccgagaatctc

SEQ ID NO: 181491 - DNA, 25 bp, Saccharomyces pastorianus
gcagtcatttggcatatattgcgca

SEQ ID NO: 181492 - DNA, 25 bp, Saccharomyces pastorianus
gggaatcacattcctattcaaagta

SEQ ID NO: 181493 - DNA, 25 bp, Saccharomyces pastorianus
gggctgaagaactatctcgcatgat

SEQ ID NO: 181494 - DNA, 25 bp, Saccharomyces pastorianus
acattactgcactgatatacttatc

SEQ ID NO: 181495 - DNA, 25 bp, Saccharomyces pastorianus
aaatgtccacgcataatcgcatgta

SEQ ID NO: 181496 - DNA, 25 bp, Saccharomyces pastorianus
atgcgcctattgtgttttttcggta

SEQ ID NO: 181497 - DNA, 25 bp, Saccharomyces pastorianus
gcttccagatcagcagtgttctttt

SEQ ID NO: 181498 - DNA, 25 bp, Saccharomyces pastorianus
ggagtcatgcaagtaccatctctaa

SEQ ID NO: 181499 - DNA, 25 bp, Saccharomyces pastorianus
cattccttgaaatggcgccaggcta

SEQ ID NO: 181500 - DNA, 25 bp, Saccharomyces pastorianus
atttcacccaatttggcttcggcta

SEQ ID NO: 181501 - DNA, 25 bp, Saccharomyces pastorianus
gtttgccatggttagcgtctactac

SEQ ID NO: 181502 - DNA, 25 bp, Saccharomyces pastorianus
ttcggctactattcttctcagtatg

SEQ ID NO: 181503 - DNA, 25 bp, Saccharomyces pastorianus
gtgtatttgacacagccgcagtaag

SEQ ID NO: 181504 - DNA, 25 bp, Saccharomyces pastorianus
gaattttggcttctactgggtatac

SEQ ID NO: 181505 - DNA, 25 bp, Saccharomyces pastorianus
gtggaagttatctccttacacatac

SEQ ID NO: 181506 - DNA, 25 bp, Saccharomyces pastorianus
ctaatgcctggattttggaccttta

SEQ ID NO: 181507 - DNA, 25 bp, Saccharomyces pastorianus
ttaacaacagaaatgcaaagcatgc

SEQ ID NO: 181508 - DNA, 25 bp, Saccharomyces pastorianus
gggcaattatctgcttaacaacaga

SEQ ID NO: 181509 - DNA, 25 bp, Saccharomyces pastorianus
tttgggcaattatctgcttaacaac

SEQ ID NO: 181510 - DNA, 25 bp, Saccharomyces pastorianus
gcaattatctgcttaacaacagaaa

SEQ ID NO: 181511 - DNA, 25 bp, Saccharomyces pastorianus
ctttgggcaattatctgcttaacaa

SEQ ID NO: 181512 - DNA, 25 bp, Saccharomyces pastorianus
ttgggcaattatctgcttaacaaca

SEQ ID NO: 181513 - DNA, 25 bp, Saccharomyces pastorianus
atctgcttaacaacagaaatgcaaa

SEQ ID NO: 181514 - DNA, 25 bp, Saccharomyces pastorianus
gctttgggcaattatctgcttaaca

SEQ ID NO: 181515 - DNA, 25 bp, Saccharomyces pastorianus
taacaacagaaatgcaaagcatgcg

SEQ ID NO: 181516 - DNA, 25 bp, Saccharomyces pastorianus
ggcaattatctgcttaacaacagaa

SEQ ID NO: 181517 - DNA, 25 bp, Saccharomyces pastorianus
tgggcaattatctgcttaacaacag

SEQ ID NO: 181518 - DNA, 25 bp, Saccharomyces pastorianus
tggtgattactttgggctcttatgc

SEQ ID NO: 181519 - DNA, 25 bp, Saccharomyces pastorianus
gataacttggcctacgcattagctt

SEQ ID NO: 181520 - DNA, 25 bp, Saccharomyces pastorianus
tttgccggctttctacgatattggt

SEQ ID NO: 181521 - DNA, 25 bp, Saccharomyces pastorianus
gtatactcctcctacaggtactgta

SEQ ID NO: 181522 - DNA, 25 bp, Saccharomyces pastorianus
tggatattcccgtcgtgaacagttt

SEQ ID NO: 181523 - DNA, 25 bp, Saccharomyces pastorianus
aaaactcctgcaccttatattctga

SEQ ID NO: 181524 - DNA, 25 bp, Saccharomyces pastorianus
ggacattgccatgcctattttgtat

SEQ ID NO: 181525 - DNA, 25 bp, Saccharomyces pastorianus
gctttcccattaatcgtcttattcg

SEQ ID NO: 181526 - DNA, 25 bp, Saccharomyces pastorianus
atgccacattgtttccgccttaata

SEQ ID NO: 181527 - DNA, 25 bp, Saccharomyces pastorianus
atatccggcttttgtggcactttaa

SEQ ID NO: 181528 - DNA, 25 bp, Saccharomyces pastorianus
gatcggattctcttactgtttattg

SEQ ID NO: 181529 - DNA, 25 bp, Saccharomyces pastorianus
aagccaatggtctgttttctttaca

SEQ ID NO: 181530 - DNA, 25 bp, Saccharomyces pastorianus
caaagttcccttagatatccgtaag

SEQ ID NO: 181531 - DNA, 25 bp, Saccharomyces pastorianus
ggaggtattttcagattcagggatt

SEQ ID NO: 181532 - DNA, 25 bp, Saccharomyces pastorianus
gacttagttatacatcttcttcctg

SEQ ID NO: 181533 - DNA, 25 bp, Saccharomyces pastorianus
tatagcgatgtgatacctgaatact

SEQ ID NO: 181534 - DNA, 25 bp, Saccharomyces pastorianus
gttttctgtaccactcaatgactta

SEQ ID NO: 181535 - DNA, 25 bp, Saccharomyces pastorianus
ataggaatgatcaacggcgacagaa

SEQ ID NO: 181536 - DNA, 25 bp, Saccharomyces pastorianus
tattcgacgtttcatgtatagctaa

SEQ ID NO: 181537 - DNA, 25 bp, Saccharomyces pastorianus
atcttcttcctgaagccgatgagga

SEQ ID NO: 181538 - DNA, 25 bp, Saccharomyces pastorianus
gcattatcattttcacgtagcaaat

SEQ ID NO: 181539 - DNA, 25 bp, Saccharomyces pastorianus
gtaatcagatgcaaccgaacggaag

SEQ ID NO: 181540 - DNA, 25 bp, Saccharomyces pastorianus
accgggtttatgtgagcgtttcgag

SEQ ID NO: 181541 - DNA, 25 bp, Saccharomyces pastorianus
ctccattggccaggtactcaaaaga

SEQ ID NO: 181542 - DNA, 25 bp, Saccharomyces pastorianus
ttggccaggtactcaaaagaacaac

SEQ ID NO: 181543 - DNA, 25 bp, Saccharomyces pastorianus
ggccaggtactcaaaagaacaaccg

SEQ ID NO: 181544 - DNA, 25 bp, Saccharomyces pastorianus
gtctccattggccaggtactcaaaa

SEQ ID NO: 181545 - DNA, 25 bp, Saccharomyces pastorianus
tccattggccaggtactcaaaagaa

SEQ ID NO: 181546 - DNA, 25 bp, Saccharomyces pastorianus
attggccaggtactcaaaagaacaa

SEQ ID NO: 181547 - DNA, 25 bp, Saccharomyces pastorianus
ccattggccaggtactcaaaagaac

SEQ ID NO: 181548 - DNA, 25 bp, Saccharomyces pastorianus
tctccattggccaggtactcaaaag

SEQ ID NO: 181549 - DNA, 25 bp, Saccharomyces pastorianus
cattggccaggtactcaaaagaaca

SEQ ID NO: 181550 - DNA, 25 bp, Saccharomyces pastorianus
aagaacaaccgggtttatgtgagcg

SEQ ID NO: 181551 - DNA, 25 bp, Saccharomyces pastorianus
aactggcttccggagggtccatatc

SEQ ID NO: 181552 - DNA, 25 bp, Saccharomyces pastorianus
gcccattaccttttgtccttggata

SEQ ID NO: 181553 - DNA, 25 bp, Saccharomyces pastorianus
tggataatcaaccagaggccgcctt

SEQ ID NO: 181554 - DNA, 25 bp, Saccharomyces pastorianus
gatgtcttgagactgtacaaccgat

SEQ ID NO: 181555 - DNA, 25 bp, Saccharomyces pastorianus
aacacggagtccagcaagccaaaga

SEQ ID NO: 181556 - DNA, 25 bp, Saccharomyces pastorianus
gatacagatccaactggcttccgga

SEQ ID NO: 181557 - DNA, 25 bp, Saccharomyces pastorianus
aagccaaagagttggcccattacct

SEQ ID NO: 181558 - DNA, 25 bp, Saccharomyces pastorianus
ggagggtccatatcctgacccactt

SEQ ID NO: 181559 - DNA, 25 bp, Saccharomyces pastorianus
gactgtacaaccgatagctaagctg

SEQ ID NO: 181560 - DNA, 25 bp, Saccharomyces pastorianus
gccttcgcttctccattttatagat

SEQ ID NO: 181561 - DNA, 25 bp, Saccharomyces pastorianus
tatcgcaaggcatggatacagatcc

SEQ ID NO: 181562 - DNA, 25 bp, Saccharomyces pastorianus
ttcgcgcccacaggcaattgtaaca

SEQ ID NO: 181563 - DNA, 25 bp, Saccharomyces pastorianus
aaattcgcgcccacaggcaattgta

SEQ ID NO: 181564 - DNA, 25 bp, Saccharomyces pastorianus
ggcaattgtaacaggtagtcaggaa

SEQ ID NO: 181565 - DNA, 25 bp, Saccharomyces pastorianus
attgtaacaggtagtcaggaagacc

SEQ ID NO: 181566 - DNA, 25 bp, Saccharomyces pastorianus
aaaattcgcgcccacaggcaattgt

SEQ ID NO: 181567 - DNA, 25 bp, Saccharomyces pastorianus
cacaggcaattgtaacaggtagtca

SEQ ID NO: 181568 - DNA, 25 bp, Saccharomyces pastorianus
gcccacaggcaattgtaacaggtag

SEQ ID NO: 181569 - DNA, 25 bp, Saccharomyces pastorianus
gtaccgaaaattcgcgcccacaggc

SEQ ID NO: 181570 - DNA, 25 bp, Saccharomyces pastorianus
ttgtaccgaaaattcgcgcccacag

SEQ ID NO: 181571 - DNA, 25 bp, Saccharomyces pastorianus
gcgcccacaggcaattgtaacaggt

SEQ ID NO: 181572 - DNA, 25 bp, Saccharomyces pastorianus
aattcgcgcccacaggcaattgtaa

SEQ ID NO: 181573 - DNA, 25 bp, Saccharomyces pastorianus
tagaatgcagcggatccttgggatt

SEQ ID NO: 181574 - DNA, 25 bp, Saccharomyces pastorianus
atggccacagaatctcaggtacttg

SEQ ID NO: 181575 - DNA, 25 bp, Saccharomyces pastorianus
tatccgatgccatctctggcagaaa

SEQ ID NO: 181576 - DNA, 25 bp, Saccharomyces pastorianus
gaatatttgtgtttctcccaagctg

SEQ ID NO: 181577 - DNA, 25 bp, Saccharomyces pastorianus
tgacttgactatagccatactggaa

SEQ ID NO: 181578 - DNA, 25 bp, Saccharomyces pastorianus
agtcgctgatttggtagtctctttg

SEQ ID NO: 181579 - DNA, 25 bp, Saccharomyces pastorianus
acgcatttatcttttcccagatcgt

SEQ ID NO: 181580 - DNA, 25 bp, Saccharomyces pastorianus
ggctgccctgcctaaagaatatttg

SEQ ID NO: 181581 - DNA, 25 bp, Saccharomyces pastorianus
actgttctaagtggtgcttttctga

SEQ ID NO: 181582 - DNA, 25 bp, Saccharomyces pastorianus
aatttctttgcagctcatggttgat

SEQ ID NO: 181583 - DNA, 25 bp, Saccharomyces pastorianus
tagaccatgtcttcacgtactgtgc

SEQ ID NO: 181584 - DNA, 25 bp, Saccharomyces pastorianus
ggcactgacacaaagacctctgcaa

SEQ ID NO: 181585 - DNA, 25 bp, Saccharomyces pastorianus
aaggctgctagtggcaacgctgatt

SEQ ID NO: 181586 - DNA, 25 bp, Saccharomyces pastorianus
gaacaaggctgcatccgctattaag

SEQ ID NO: 181587 - DNA, 25 bp, Saccharomyces pastorianus
aaacctgcacccgaaagagcgagga

SEQ ID NO: 181588 - DNA, 25 bp, Saccharomyces pastorianus
ggaaactagtacctgcaccaacaat

SEQ ID NO: 181589 - DNA, 25 bp, Saccharomyces pastorianus
gagcgattctaatggcaactctaat

SEQ ID NO: 181590 - DNA, 25 bp, Saccharomyces pastorianus
gcaatattaccgaagccagctaaca

SEQ ID NO: 181591 - DNA, 25 bp, Saccharomyces pastorianus
gaaagaaccgaacacaagctccaaa

SEQ ID NO: 181592 - DNA, 25 bp, Saccharomyces pastorianus
gacattccgttgtaccaaactgaca

SEQ ID NO: 181593 - DNA, 25 bp, Saccharomyces pastorianus
ctgcaccaacaatcaattcacctaa

SEQ ID NO: 181594 - DNA, 25 bp, Saccharomyces pastorianus
gaaacaagctcaaaatctcccagga

SEQ ID NO: 181595 - DNA, 25 bp, Saccharomyces pastorianus
gtattcgtggttttagcataggtaa

SEQ ID NO: 181596 - DNA, 25 bp, Saccharomyces pastorianus
gttatggaacactaagtacaacatt

SEQ ID NO: 181597 - DNA, 25 bp, Saccharomyces pastorianus
aggtaaaccagtagagtccgatcgt

SEQ ID NO: 181598 - DNA, 25 bp, Saccharomyces pastorianus
gatggatgcctctagttggcgtttt

SEQ ID NO: 181599 - DNA, 25 bp, Saccharomyces pastorianus
gagtccgatcgtttagagaaagctt

SEQ ID NO: 181600 - DNA, 25 bp, Saccharomyces pastorianus
gggacctgtggcacataccaatttt

SEQ ID NO: 181601 - DNA, 25 bp, Saccharomyces pastorianus
gaaagctttgcatttagctgaaagg

SEQ ID NO: 181602 - DNA, 25 bp, Saccharomyces pastorianus
cctctagttggcgtttttggactat

SEQ ID NO: 181603 - DNA, 25 bp, Saccharomyces pastorianus
aaaccctcatttgaacatagagaag

SEQ ID NO: 181604 - DNA, 25 bp, Saccharomyces pastorianus
aaatctgtggacgataacgttgtat

SEQ ID NO: 181605 - DNA, 25 bp, Saccharomyces pastorianus
tatgactatagggtttttggaaaat

SEQ ID NO: 181606 - DNA, 25 bp, Saccharomyces pastorianus
ggaggtcgtccttaagcaaatttgg

SEQ ID NO: 181607 - DNA, 25 bp, Saccharomyces pastorianus
gaccgaagaccaggaggtcgtcctt

SEQ ID NO: 181608 - DNA, 25 bp, Saccharomyces pastorianus
atgtcctttgatagacagttgaccg

SEQ ID NO: 181609 - DNA, 25 bp, Saccharomyces pastorianus
ttgatagacagttgaccgaagacca

SEQ ID NO: 181610 - DNA, 25 bp, Saccharomyces pastorianus
taagcaaatttggacacaccttttc

SEQ ID NO: 181611 - DNA, 25 bp, Saccharomyces pastorianus
gacagttgaccgaagaccaggaggt

SEQ ID NO: 181612 - DNA, 25 bp, Saccharomyces pastorianus
agaccaggaggtcgtccttaagcaa

SEQ ID NO: 181613 - DNA, 25 bp, Saccharomyces pastorianus
accaggaggtcgtccttaagcaaat

SEQ ID NO: 181614 - DNA, 25 bp, Saccharomyces pastorianus
gtcctttgatagacagttgaccgaa

SEQ ID NO: 181615 - DNA, 25 bp, Saccharomyces pastorianus
aatttggacacaccttttccatctg

SEQ ID NO: 181616 - DNA, 25 bp, Saccharomyces pastorianus
atagacagttgaccgaagaccagga

SEQ ID NO: 181617 - DNA, 25 bp, Saccharomyces pastorianus
gggactccaaattatatggcaccag

SEQ ID NO: 181618 - DNA, 25 bp, Saccharomyces pastorianus
gttgctgtgcattaaggtagttcat

SEQ ID NO: 181619 - DNA, 25 bp, Saccharomyces pastorianus
aagcggcatgccactggattttaat

SEQ ID NO: 181620 - DNA, 25 bp, Saccharomyces pastorianus
gcgggcatagttcattcggatttaa

SEQ ID NO: 181621 - DNA, 25 bp, Saccharomyces pastorianus
ccatctgatatgtggtcatgcggtt

SEQ ID NO: 181622 - DNA, 25 bp, Saccharomyces pastorianus
ggcagtttccaaggccaaaataggc

SEQ ID NO: 181623 - DNA, 25 bp, Saccharomyces pastorianus
tatggcaccagaagcactagttgct

SEQ ID NO: 181624 - DNA, 25 bp, Saccharomyces pastorianus
tggtcatgcggttgtattatatatc

SEQ ID NO: 181625 - DNA, 25 bp, Saccharomyces pastorianus
gtgaaactcaaattgggactccaaa

SEQ ID NO: 181626 - DNA, 25 bp, Saccharomyces pastorianus
atagcaaacgcggtaccggaacata

SEQ ID NO: 181627 - DNA, 25 bp, Saccharomyces pastorianus
aaggtagttcatgatgcgggcatag

SEQ ID NO: 181628 - DNA, 25 bp, Saccharomyces pastorianus
gcaaacggtttggatgatttattga

SEQ ID NO: 181629 - DNA, 25 bp, Saccharomyces pastorianus
tggtgagcctttgccgatcaaaaca

SEQ ID NO: 181630 - DNA, 25 bp, Saccharomyces pastorianus
gatttctggcgtaaacttgactagc

SEQ ID NO: 181631 - DNA, 25 bp, Saccharomyces pastorianus
tgactagcaaaaaggcaaacggttt

SEQ ID NO: 181632 - DNA, 25 bp, Saccharomyces pastorianus
ggacccaatccaaacaattctccat

SEQ ID NO: 181633 - DNA, 25 bp, Saccharomyces pastorianus
tattccgaacaatccaatcactggt

SEQ ID NO: 181634 - DNA, 25 bp, Saccharomyces pastorianus
aggaggacccaaaccagcaagtacg

SEQ ID NO: 181635 - DNA, 25 bp, Saccharomyces pastorianus
tttgccgatcaaaacatccccttct

SEQ ID NO: 181636 - DNA, 25 bp, Saccharomyces pastorianus
caatcactggtgagcctttgccgat

SEQ ID NO: 181637 - DNA, 25 bp, Saccharomyces pastorianus
tttattgagtttggcaggaggaccc

SEQ ID NO: 181638 - DNA, 25 bp, Saccharomyces pastorianus
catcctctcccatatcaaggatttc

SEQ ID NO: 181639 - DNA, 25 bp, Saccharomyces pastorianus
atctcctccggttctggaattggca

SEQ ID NO: 181640 - DNA, 25 bp, Saccharomyces pastorianus
ttgcctgctccaaatgcgtacagat

SEQ ID NO: 181641 - DNA, 25 bp, Saccharomyces pastorianus
gttccttagccgctgttattgtaga

SEQ ID NO: 181642 - DNA, 25 bp, Saccharomyces pastorianus
aatgcctggtaacttggtcttgcct

SEQ ID NO: 181643 - DNA, 25 bp, Saccharomyces pastorianus
ttgagcactggttccgaggcaaatg

SEQ ID NO: 181644 - DNA, 25 bp, Saccharomyces pastorianus
gattgatgctgcctctgttggttcc

SEQ ID NO: 181645 - DNA, 25 bp, Saccharomyces pastorianus
tgccatgtttgggttcgaagcctac

SEQ ID NO: 181646 - DNA, 25 bp, Saccharomyces pastorianus
gtacagatccatctttcggaagcaa

SEQ ID NO: 181647 - DNA, 25 bp, Saccharomyces pastorianus
ggattatcattatcgtggcacggta

SEQ ID NO: 181648 - DNA, 25 bp, Saccharomyces pastorianus
ggaactacctaccaagatggccgta

SEQ ID NO: 181649 - DNA, 25 bp, Saccharomyces pastorianus
cactggtttacttccaaatggctta

SEQ ID NO: 181650 - DNA, 25 bp, Saccharomyces pastorianus
attgactcactatccactctaggag

SEQ ID NO: 181651 - DNA, 25 bp, Saccharomyces pastorianus
agcctggaaacatacttatacactg

SEQ ID NO: 181652 - DNA, 25 bp, Saccharomyces pastorianus
ttttgctatgagatgcgcggatgtt

SEQ ID NO: 181653 - DNA, 25 bp, Saccharomyces pastorianus
ctggataacccttttcagaacatta

SEQ ID NO: 181654 - DNA, 25 bp, Saccharomyces pastorianus
tctaggagagttttgcttgcaagcc

SEQ ID NO: 181655 - DNA, 25 bp, Saccharomyces pastorianus
ttggcgccagcgattcatatcaaga

SEQ ID NO: 181656 - DNA, 25 bp, Saccharomyces pastorianus
aatatccttccatagttctgagatt

SEQ ID NO: 181657 - DNA, 25 bp, Saccharomyces pastorianus
attgatgccaaaaccgcccattgac

SEQ ID NO: 181658 - DNA, 25 bp, Saccharomyces pastorianus
gatactcccagttgcaaatcttact

SEQ ID NO: 181659 - DNA, 25 bp, Saccharomyces pastorianus
gcggttattacccttgaactggata

SEQ ID NO: 181660 - DNA, 25 bp, Saccharomyces pastorianus
tatcttatactgtctttgccagtgg

SEQ ID NO: 181661 - DNA, 25 bp, Saccharomyces pastorianus
aaagaatctcagttcaatccttact

SEQ ID NO: 181662 - DNA, 25 bp, Saccharomyces pastorianus
atggatcgttctagattagctggta

SEQ ID NO: 181663 - DNA, 25 bp, Saccharomyces pastorianus
tttggcctttgggaaacagtctgct

SEQ ID NO: 181664 - DNA, 25 bp, Saccharomyces pastorianus
atcctgcctacgatgggcctattta

SEQ ID NO: 181665 - DNA, 25 bp, Saccharomyces pastorianus
gcctctgtaacgcatgtggactttt

SEQ ID NO: 181666 - DNA, 25 bp, Saccharomyces pastorianus
acgcatgtggacttttctatagaaa

SEQ ID NO: 181667 - DNA, 25 bp, Saccharomyces pastorianus
aacagtctgctaaacgatacttgga

SEQ ID NO: 181668 - DNA, 25 bp, Saccharomyces pastorianus
aggaatgcaagacctatcctgccta

SEQ ID NO: 181669 - DNA, 25 bp, Saccharomyces pastorianus
aagaaccgatgccaaccccaacaat

SEQ ID NO: 181670 - DNA, 25 bp, Saccharomyces pastorianus
aattacgaaaacctgcggccaatgc

SEQ ID NO: 181671 - DNA, 25 bp, Saccharomyces pastorianus
caaccggtggatcgtgcctctgtaa

SEQ ID NO: 181672 - DNA, 25 bp, Saccharomyces pastorianus
gtaacaactcctcagcactaattag

SEQ ID NO: 181673 - DNA, 25 bp, Saccharomyces pastorianus
agtaacaatcgtgcccatatcttca

SEQ ID NO: 181674 - DNA, 25 bp, Saccharomyces pastorianus
atcctaccaggtggccatctaagaa

SEQ ID NO: 181675 - DNA, 25 bp, Saccharomyces pastorianus
cagtttccctattgacggtagtaca

SEQ ID NO: 181676 - DNA, 25 bp, Saccharomyces pastorianus
aacatccctttaccatagccagtat

SEQ ID NO: 181677 - DNA, 25 bp, Saccharomyces pastorianus
ttctcatttaatacccttccaacat

SEQ ID NO: 181678 - DNA, 25 bp, Saccharomyces pastorianus
gggcatttccttcggtttaccattg

SEQ ID NO: 181679 - DNA, 25 bp, Saccharomyces pastorianus
tcattatctgttctggagttcccat

SEQ ID NO: 181680 - DNA, 25 bp, Saccharomyces pastorianus
gagttcccattagttgatttgccca

SEQ ID NO: 181681 - DNA, 25 bp, Saccharomyces pastorianus
gctgaacttcgtcatcaaggcacaa

SEQ ID NO: 181682 - DNA, 25 bp, Saccharomyces pastorianus
ggtcatcgaagaacccattccgtaa

SEQ ID NO: 181683 - DNA, 25 bp, Saccharomyces pastorianus
ggcgccttatttactacatttgcta

SEQ ID NO: 181684 - DNA, 25 bp, Saccharomyces pastorianus
ttgccttgtttgaccttcaacaaaa

SEQ ID NO: 181685 - DNA, 25 bp, Saccharomyces pastorianus
atactttcagcttttatcttgtttg

SEQ ID NO: 181686 - DNA, 25 bp, Saccharomyces pastorianus
atgcttgttggctatttggtagcta

SEQ ID NO: 181687 - DNA, 25 bp, Saccharomyces pastorianus
taacggctccatttttactgctgaa

SEQ ID NO: 181688 - DNA, 25 bp, Saccharomyces pastorianus
tgttttaggtgccacgggcgcctta

SEQ ID NO: 181689 - DNA, 25 bp, Saccharomyces pastorianus
gggctcatatttgcgggtttctttc

SEQ ID NO: 181690 - DNA, 25 bp, Saccharomyces pastorianus
gcgggtttctttccaaatatatcag

SEQ ID NO: 181691 - DNA, 25 bp, Saccharomyces pastorianus
gatttacctattgcctatattcaga

SEQ ID NO: 181692 - DNA, 25 bp, Saccharomyces pastorianus
acatttgctacgactgtgcccaaaa

SEQ ID NO: 181693 - DNA, 25 bp, Saccharomyces pastorianus
ggttgttaacgctattttgccttgt

SEQ ID NO: 181694 - DNA, 25 bp, Saccharomyces pastorianus
cagtgattgtgatggccggtattgc

SEQ ID NO: 181695 - DNA, 25 bp, Saccharomyces pastorianus
tttgctgcaaggattcatatgggac

SEQ ID NO: 181696 - DNA, 25 bp, Saccharomyces pastorianus
cgttgatttaaggtggttccggatg

SEQ ID NO: 181697 - DNA, 25 bp, Saccharomyces pastorianus
acaccgagcggctttgctgcaagga

SEQ ID NO: 181698 - DNA, 25 bp, Saccharomyces pastorianus
ttttattattggctgtcagctcaag

SEQ ID NO: 181699 - DNA, 25 bp, Saccharomyces pastorianus
ggctgtcagctcaagaaggaaatta

SEQ ID NO: 181700 - DNA, 25 bp, Saccharomyces pastorianus
tatgaataaagaacaccgagcggct

SEQ ID NO: 181701 - DNA, 25 bp, Saccharomyces pastorianus
gttccggatgttttgtctgatctta

SEQ ID NO: 181702 - DNA, 25 bp, Saccharomyces pastorianus
gactatagattaatgaggttgctta

SEQ ID NO: 181703 - DNA, 25 bp, Saccharomyces pastorianus
ggctgccgaaacagtgattgtgatg

SEQ ID NO: 181704 - DNA, 25 bp, Saccharomyces pastorianus
gattcatatgggacgttgatttaag

SEQ ID NO: 181705 - DNA, 25 bp, Saccharomyces pastorianus
gaaaatgacctaaataatcacagta

SEQ ID NO: 181706 - DNA, 25 bp, Saccharomyces pastorianus
ggaagtagcagaaaatgacctaaat

SEQ ID NO: 181707 - DNA, 25 bp, Saccharomyces pastorianus
tgaggaagtagcagaaaatgaccta

SEQ ID NO: 181708 - DNA, 25 bp, Saccharomyces pastorianus
tgcaactaaatgaggaagtagcaga

SEQ ID NO: 181709 - DNA, 25 bp, Saccharomyces pastorianus
atgcaactaaatgaggaagtagcag

SEQ ID NO: 181710 - DNA, 25 bp, Saccharomyces pastorianus
aaatgacctaaataatcacagtaac

SEQ ID NO: 181711 - DNA, 25 bp, Saccharomyces pastorianus
caactaaatgaggaagtagcagaaa

SEQ ID NO: 181712 - DNA, 25 bp, Saccharomyces pastorianus
aatgaggaagtagcagaaaatgacc

SEQ ID NO: 181713 - DNA, 25 bp, Saccharomyces pastorianus
gaagtagcagaaaatgacctaaata

SEQ ID NO: 181714 - DNA, 25 bp, Saccharomyces pastorianus
gcaactaaatgaggaagtagcagaa

SEQ ID NO: 181715 - DNA, 25 bp, Saccharomyces pastorianus
gaggaagtagcagaaaatgacctaa

SEQ ID NO: 181716 - DNA, 25 bp, Saccharomyces pastorianus
ctacacgctgaaagggacttggcat

SEQ ID NO: 181717 - DNA, 25 bp, Saccharomyces pastorianus
aaagttgcaacacttgaggagccgt

SEQ ID NO: 181718 - DNA, 25 bp, Saccharomyces pastorianus
ggtcaccaaggatacaaagaaatac

SEQ ID NO: 181719 - DNA, 25 bp, Saccharomyces pastorianus
gggacttggcattggctgaaacttt

SEQ ID NO: 181720 - DNA, 25 bp, Saccharomyces pastorianus
gttttgattttactacacgctgaaa

SEQ ID NO: 181721 - DNA, 25 bp, Saccharomyces pastorianus
tgaggagccgttgccatttggtcac

SEQ ID NO: 181722 - DNA, 25 bp, Saccharomyces pastorianus
gccacctatggtaatcgtgcagaac

SEQ ID NO: 181723 - DNA, 25 bp, Saccharomyces pastorianus
atcattgccacctatggtaatcgtg

SEQ ID NO: 181724 - DNA, 25 bp, Saccharomyces pastorianus
gccgttgccatttggtcaccaagga

SEQ ID NO: 181725 - DNA, 25 bp, Saccharomyces pastorianus
aacacttgaggagccgttgccattt

SEQ ID NO: 181726 - DNA, 25 bp, Saccharomyces pastorianus
gtatggcgaaattaactccgaggat

SEQ ID NO: 181727 - DNA, 25 bp, Saccharomyces pastorianus
gcggcagacacgtatgggcatatcg

SEQ ID NO: 181728 - DNA, 25 bp, Saccharomyces pastorianus
gggcatatcgcggtaatcatccagc

SEQ ID NO: 181729 - DNA, 25 bp, Saccharomyces pastorianus
acacgtatgggcatatcgcggtaat

SEQ ID NO: 181730 - DNA, 25 bp, Saccharomyces pastorianus
ttaagggttgatgtggctcgttccg

SEQ ID NO: 181731 - DNA, 25 bp, Saccharomyces pastorianus
gttgatgtggctcgttccggcggca

SEQ ID NO: 181732 - DNA, 25 bp, Saccharomyces pastorianus
gtatgggcatatcgcggtaatcatc

SEQ ID NO: 181733 - DNA, 25 bp, Saccharomyces pastorianus
ttccggcggcagacacgtatgggca

SEQ ID NO: 181734 - DNA, 25 bp, Saccharomyces pastorianus
ccggcggcagacacgtatgggcata

SEQ ID NO: 181735 - DNA, 25 bp, Saccharomyces pastorianus
gcagacacgtatgggcatatcgcgg

SEQ ID NO: 181736 - DNA, 25 bp, Saccharomyces pastorianus
ggcggcagacacgtatgggcatatc

SEQ ID NO: 181737 - DNA, 25 bp, Saccharomyces pastorianus
acgtatgggcatatcgcggtaatca

SEQ ID NO: 181738 - DNA, 25 bp, Saccharomyces pastorianus
aagagcgtccaattatttatgcaga

SEQ ID NO: 181739 - DNA, 25 bp, Saccharomyces pastorianus
gaaggtccgcacgatggttgtattt

SEQ ID NO: 181740 - DNA, 25 bp, Saccharomyces pastorianus
ggttgtatttcgctgagaactgcat

SEQ ID NO: 181741 - DNA, 25 bp, Saccharomyces pastorianus
gacttctttgatactgctatttgtg

SEQ ID NO: 181742 - DNA, 25 bp, Saccharomyces pastorianus
gtcgagacgccttacccaaatttgg

SEQ ID NO: 181743 - DNA, 25 bp, Saccharomyces pastorianus
gggctctttcaggtcattgattcag

SEQ ID NO: 181744 - DNA, 25 bp, Saccharomyces pastorianus
tattagggccatcagacgacttctt

SEQ ID NO: 181745 - DNA, 25 bp, Saccharomyces pastorianus
gatttacaccatatttctccaacgt

SEQ ID NO: 181746 - DNA, 25 bp, Saccharomyces pastorianus
gcttccgcgtatttctctcaaaaat

SEQ ID NO: 181747 - DNA, 25 bp, Saccharomyces pastorianus
gagttagacgatggtagtttgcccc

SEQ ID NO: 181748 - DNA, 25 bp, Saccharomyces pastorianus
ttgtcttttacatgggctctttcag

SEQ ID NO: 181749 - DNA, 25 bp, Saccharomyces pastorianus
taatattacgatcgttcctcattcc

SEQ ID NO: 181750 - DNA, 25 bp, Saccharomyces pastorianus
atattacgatcgttcctcattccgt

SEQ ID NO: 181751 - DNA, 25 bp, Saccharomyces pastorianus
tactaatattacgatcgttcctcat

SEQ ID NO: 181752 - DNA, 25 bp, Saccharomyces pastorianus
aatattacgatcgttcctcattccg

SEQ ID NO: 181753 - DNA, 25 bp, Saccharomyces pastorianus
actaatattacgatcgttcctcatt

SEQ ID NO: 181754 - DNA, 25 bp, Saccharomyces pastorianus
atactaatattacgatcgttcctca

SEQ ID NO: 181755 - DNA, 25 bp, Saccharomyces pastorianus
cgttttatacgtttcattatcctat

SEQ ID NO: 181756 - DNA, 25 bp, Saccharomyces pastorianus
tacgatcgttcctcattccgtttta

SEQ ID NO: 181757 - DNA, 25 bp, Saccharomyces pastorianus
attacgatcgttcctcattccgttt

SEQ ID NO: 181758 - DNA, 25 bp, Saccharomyces pastorianus
tccgttttatacgtttcattatcct

SEQ ID NO: 181759 - DNA, 25 bp, Saccharomyces pastorianus
ttacgatcgttcctcattccgtttt

SEQ ID NO: 181760 - DNA, 25 bp, Saccharomyces pastorianus
tctcaaggatataggaattctcaaa

SEQ ID NO: 181761 - DNA, 25 bp, Saccharomyces pastorianus
cccaatcttcaattatgtatacaga

SEQ ID NO: 181762 - DNA, 25 bp, Saccharomyces pastorianus
ttcttctcaaggatataggaattct

SEQ ID NO: 181763 - DNA, 25 bp, Saccharomyces pastorianus
tcacccaatcttcaattatgtatac

SEQ ID NO: 181764 - DNA, 25 bp, Saccharomyces pastorianus
acccaatcttcaattatgtatacag

SEQ ID NO: 181765 - DNA, 25 bp, Saccharomyces pastorianus
ccaatcttcaattatgtatacagaa

SEQ ID NO: 181766 - DNA, 25 bp, Saccharomyces pastorianus
cttctcaaggatataggaattctca

SEQ ID NO: 181767 - DNA, 25 bp, Saccharomyces pastorianus
agttcttctcaaggatataggaatt

SEQ ID NO: 181768 - DNA, 25 bp, Saccharomyces pastorianus
ttctcaaggatataggaattctcaa

SEQ ID NO: 181769 - DNA, 25 bp, Saccharomyces pastorianus
tcttctcaaggatataggaattctc

SEQ ID NO: 181770 - DNA, 25 bp, Saccharomyces pastorianus
cacccaatcttcaattatgtataca

SEQ ID NO: 181771 - DNA, 25 bp, Saccharomyces pastorianus
atctattacattatgggtggtatgt

SEQ ID NO: 181772 - DNA, 25 bp, Saccharomyces pastorianus
ctattacattatgggtggtatgttg

SEQ ID NO: 181773 - DNA, 25 bp, Saccharomyces pastorianus
cattatgggtggtatgttggaataa

SEQ ID NO: 181774 - DNA, 25 bp, Saccharomyces pastorianus
cattagatctattacattatgggtg

SEQ ID NO: 181775 - DNA, 25 bp, Saccharomyces pastorianus
tctattacattatgggtggtatgtt

SEQ ID NO: 181776 - DNA, 25 bp, Saccharomyces pastorianus
ttagatctattacattatgggtggt

SEQ ID NO: 181777 - DNA, 25 bp, Saccharomyces pastorianus
attatgggtggtatgttggaataaa

SEQ ID NO: 181778 - DNA, 25 bp, Saccharomyces pastorianus
tcattagatctattacattatgggt

SEQ ID NO: 181779 - DNA, 25 bp, Saccharomyces pastorianus
gatctattacattatgggtggtatg

SEQ ID NO: 181780 - DNA, 25 bp, Saccharomyces pastorianus
ttcattagatctattacattatggg

SEQ ID NO: 181781 - DNA, 25 bp, Saccharomyces pastorianus
attagatctattacattatgggtgg

SEQ ID NO: 181782 - DNA, 25 bp, Saccharomyces pastorianus
ttacctcccgtgttattgatcaaat

SEQ ID NO: 181783 - DNA, 25 bp, Saccharomyces pastorianus
tattgatcaaattcgaagcagcttt

SEQ ID NO: 181784 - DNA, 25 bp, Saccharomyces pastorianus
atttgcttatgtgtgtgtcttggaa

SEQ ID NO: 181785 - DNA, 25 bp, Saccharomyces pastorianus
ttcaattttacctcccgtgttattg

SEQ ID NO: 181786 - DNA, 25 bp, Saccharomyces pastorianus
gcaaatttgcttatgtgtgtgtctt

SEQ ID NO: 181787 - DNA, 25 bp, Saccharomyces pastorianus
gctttaagagcaggcccaagtgcaa

SEQ ID NO: 181788 - DNA, 25 bp, Saccharomyces pastorianus
acctcccgtgttattgatcaaattc

SEQ ID NO: 181789 - DNA, 25 bp, Saccharomyces pastorianus
gtgtgtgtcttggaaaacttcaggt

SEQ ID NO: 181790 - DNA, 25 bp, Saccharomyces pastorianus
aagcagctttaagagcaggcccaag

SEQ ID NO: 181791 - DNA, 25 bp, Saccharomyces pastorianus
gcaggcccaagtgcaaatttgctta

SEQ ID NO: 181792 - DNA, 25 bp, Saccharomyces pastorianus
attttacctcccgtgttattgatca

SEQ ID NO: 181793 - DNA, 25 bp, Saccharomyces pastorianus
aaggatgtattggtttgagtcaaac

SEQ ID NO: 181794 - DNA, 25 bp, Saccharomyces pastorianus
agttcgtcctactcccggtgaggtg

SEQ ID NO: 181795 - DNA, 25 bp, Saccharomyces pastorianus
tattcacggatgtactaaaaagtca

SEQ ID NO: 181796 - DNA, 25 bp, Saccharomyces pastorianus
aagtcaagcaaatacagaaccagaa

SEQ ID NO: 181797 - DNA, 25 bp, Saccharomyces pastorianus
aaagctattgttcaaatggcgaaga

SEQ ID NO: 181798 - DNA, 25 bp, Saccharomyces pastorianus
aggctccttttcctgaagagaatat

SEQ ID NO: 181799 - DNA, 25 bp, Saccharomyces pastorianus
gaagagaatatcatcgacgcaaaga

SEQ ID NO: 181800 - DNA, 25 bp, Saccharomyces pastorianus
aaatgaggctccttttcctgaagag

SEQ ID NO: 181801 - DNA, 25 bp, Saccharomyces pastorianus
tcccggtgaggtggcttctaaagct

SEQ ID NO: 181802 - DNA, 25 bp, Saccharomyces pastorianus
tttatcacttgctacagaaggatgt

SEQ ID NO: 181803 - DNA, 25 bp, Saccharomyces pastorianus
gagcaaactaccatccaaactgaaa

SEQ ID NO: 181804 - DNA, 25 bp, Saccharomyces pastorianus
gaaagtgttgagacaaagggccaaa

SEQ ID NO: 181805 - DNA, 25 bp, Saccharomyces pastorianus
agcccgcaattcaggaaagtgttga

SEQ ID NO: 181806 - DNA, 25 bp, Saccharomyces pastorianus
atgtcccagtcgaaccctatcttac

SEQ ID NO: 181807 - DNA, 25 bp, Saccharomyces pastorianus
tatcaaagaagaaatagcccgcaat

SEQ ID NO: 181808 - DNA, 25 bp, Saccharomyces pastorianus
ggcctcgctattacaacagccatag

SEQ ID NO: 181809 - DNA, 25 bp, Saccharomyces pastorianus
atcttacgtggcctcgctattacaa

SEQ ID NO: 181810 - DNA, 25 bp, Saccharomyces pastorianus
agtcgaaccctatcttacgtggcct

SEQ ID NO: 181811 - DNA, 25 bp, Saccharomyces pastorianus
cggttatgctatctactttgactat

SEQ ID NO: 181812 - DNA, 25 bp, Saccharomyces pastorianus
tatgctatctactttgactatcaaa

SEQ ID NO: 181813 - DNA, 25 bp, Saccharomyces pastorianus
aaatagcccgcaattcaggaaagtg

SEQ ID NO: 181814 - DNA, 25 bp, Saccharomyces pastorianus
gctattacaacagccatagctgctc

SEQ ID NO: 181815 - DNA, 25 bp, Saccharomyces pastorianus
cagccactaatgaaggcggtgtcga

SEQ ID NO: 181816 - DNA, 25 bp, Saccharomyces pastorianus
gagtgaagttgcaccagaggagatc

SEQ ID NO: 181817 - DNA, 25 bp, Saccharomyces pastorianus
aagttggcggagctggttccatccc

SEQ ID NO: 181818 - DNA, 25 bp, Saccharomyces pastorianus
aatatggctctgaaaaagggtctcc

SEQ ID NO: 181819 - DNA, 25 bp, Saccharomyces pastorianus
ttagaagacccagccactaatgaag

SEQ ID NO: 181820 - DNA, 25 bp, Saccharomyces pastorianus
aaaactggcataaatatggctctga

SEQ ID NO: 181821 - DNA, 25 bp, Saccharomyces pastorianus
gaccatgaactgtccattcaagaca

SEQ ID NO: 181822 - DNA, 25 bp, Saccharomyces pastorianus
aagacggtgtcaagtataagattac

SEQ ID NO: 181823 - DNA, 25 bp, Saccharomyces pastorianus
ggatctagatctatcattacataca

SEQ ID NO: 181824 - DNA, 25 bp, Saccharomyces pastorianus
ggttccatcccagggcagtatgttc

SEQ ID NO: 181825 - DNA, 25 bp, Saccharomyces pastorianus
tgaaaaagggtctccagcaggtcca

SEQ ID NO: 181826 - DNA, 25 bp, Saccharomyces pastorianus
ttgatatctgctgtcgttacctcag

SEQ ID NO: 181827 - DNA, 25 bp, Saccharomyces pastorianus
atatctgctgtcgttacctcagtaa

SEQ ID NO: 181828 - DNA, 25 bp, Saccharomyces pastorianus
gtcttaacaatttcaagcttattca

SEQ ID NO: 181829 - DNA, 25 bp, Saccharomyces pastorianus
atggtacgctggcatgtcttaacaa

SEQ ID NO: 181830 - DNA, 25 bp, Saccharomyces pastorianus
gcgaaatactatggtacgctggcat

SEQ ID NO: 181831 - DNA, 25 bp, Saccharomyces pastorianus
ggcatgtcttaacaatttcaagctt

SEQ ID NO: 181832 - DNA, 25 bp, Saccharomyces pastorianus
actatggtacgctggcatgtcttaa

SEQ ID NO: 181833 - DNA, 25 bp, Saccharomyces pastorianus
cgttacctcagtaaagcgaaatact

SEQ ID NO: 181834 - DNA, 25 bp, Saccharomyces pastorianus
gctgtcgttacctcagtaaagcgaa

SEQ ID NO: 181835 - DNA, 25 bp, Saccharomyces pastorianus
atctgctgtcgttacctcagtaaag

SEQ ID NO: 181836 - DNA, 25 bp, Saccharomyces pastorianus
gtacgctggcatgtcttaacaattt

SEQ ID NO: 181837 - DNA, 25 bp, Saccharomyces pastorianus
atagtggtcctggtcacggtatttt

SEQ ID NO: 181838 - DNA, 25 bp, Saccharomyces pastorianus
ccaattactgtgatagccaagggaa

SEQ ID NO: 181839 - DNA, 25 bp, Saccharomyces pastorianus
ggtcacggtattttacaagctggta

SEQ ID NO: 181840 - DNA, 25 bp, Saccharomyces pastorianus
attcatagtggtcctggtcacggta

SEQ ID NO: 181841 - DNA, 25 bp, Saccharomyces pastorianus
tggtcctggtcacggtattttacaa

SEQ ID NO: 181842 - DNA, 25 bp, Saccharomyces pastorianus
gtattattcatagtggtcctggtca

SEQ ID NO: 181843 - DNA, 25 bp, Saccharomyces pastorianus
tactgtgatagccaagggaaccttg

SEQ ID NO: 181844 - DNA, 25 bp, Saccharomyces pastorianus
ttaataagtgaaacattcgaagctg

SEQ ID NO: 181845 - DNA, 25 bp, Saccharomyces pastorianus
gggaaccttggtggtattattcata

SEQ ID NO: 181846 - DNA, 25 bp, Saccharomyces pastorianus
tacaagctggtaaaaatgacgatga

SEQ ID NO: 181847 - DNA, 25 bp, Saccharomyces pastorianus
gacagttttcagtgcccccaattac

SEQ ID NO: 181848 - DNA, 25 bp, Saccharomyces pastorianus
ggcaccgtagttctgtgagcgcaat

SEQ ID NO: 181849 - DNA, 25 bp, Saccharomyces pastorianus
tgtagagccaggaccgtgttcgcga

SEQ ID NO: 181850 - DNA, 25 bp, Saccharomyces pastorianus
taggcgtcggactaccagttgatgt

SEQ ID NO: 181851 - DNA, 25 bp, Saccharomyces pastorianus
atctggccgcgaagacataactgga

SEQ ID NO: 181852 - DNA, 25 bp, Saccharomyces pastorianus
gaccgtgttcgcgaggaagttctat

SEQ ID NO: 181853 - DNA, 25 bp, Saccharomyces pastorianus
ttcggcggcttttcacaagtacatg

SEQ ID NO: 181854 - DNA, 25 bp, Saccharomyces pastorianus
gtggatgacgattcggcggcttttc

SEQ ID NO: 181855 - DNA, 25 bp, Saccharomyces pastorianus
gcgagacctatccaaggctctagat

SEQ ID NO: 181856 - DNA, 25 bp, Saccharomyces pastorianus
aggtgtttgctaggcgtcggactac

SEQ ID NO: 181857 - DNA, 25 bp, Saccharomyces pastorianus
agttctatagatggtctgctgccct

SEQ ID NO: 181858 - DNA, 25 bp, Saccharomyces pastorianus
gaagccttagcgttccggcagaaca

SEQ ID NO: 181859 - DNA, 25 bp, Saccharomyces pastorianus
atgtcttcctcggtcatttcttctt

SEQ ID NO: 181860 - DNA, 25 bp, Saccharomyces pastorianus
ctcggtcatttcttcttctgcaacg

SEQ ID NO: 181861 - DNA, 25 bp, Saccharomyces pastorianus
tcggtcatttcttcttctgcaacga

SEQ ID NO: 181862 - DNA, 25 bp, Saccharomyces pastorianus
atcatccgtcattcaaaccagtagt

SEQ ID NO: 181863 - DNA, 25 bp, Saccharomyces pastorianus
tgaatcatctaaatcatccgtcatt

SEQ ID NO: 181864 - DNA, 25 bp, Saccharomyces pastorianus
gacctccacttctatattctctgaa

SEQ ID NO: 181865 - DNA, 25 bp, Saccharomyces pastorianus
tgcaacgacctccacttctatattc

SEQ ID NO: 181866 - DNA, 25 bp, Saccharomyces pastorianus
ggtcatttcttcttctgcaacgacc

SEQ ID NO: 181867 - DNA, 25 bp, Saccharomyces pastorianus
ttctgcaacgacctccacttctata

SEQ ID NO: 181868 - DNA, 25 bp, Saccharomyces pastorianus
cggtcatttcttcttctgcaacgac

SEQ ID NO: 181869 - DNA, 25 bp, Saccharomyces pastorianus
gcaacgacctccacttctatattct

SEQ ID NO: 181870 - DNA, 25 bp, Saccharomyces pastorianus
gtcaatatcacagaaaaatcacctc

SEQ ID NO: 181871 - DNA, 25 bp, Saccharomyces pastorianus
aatatcacagaaaaatcacctccaa

SEQ ID NO: 181872 - DNA, 25 bp, Saccharomyces pastorianus
caatatcacagaaaaatcacctcca

SEQ ID NO: 181873 - DNA, 25 bp, Saccharomyces pastorianus
cagaaaaatcacctccaaaatcacc

SEQ ID NO: 181874 - DNA, 25 bp, Saccharomyces pastorianus
tgctcttaatatatgcgttatacca

SEQ ID NO: 181875 - DNA, 25 bp, Saccharomyces pastorianus
tatcacagaaaaatcacctccaaaa

SEQ ID NO: 181876 - DNA, 25 bp, Saccharomyces pastorianus
cacagaaaaatcacctccaaaatca

SEQ ID NO: 181877 - DNA, 25 bp, Saccharomyces pastorianus
atatcacagaaaaatcacctccaaa

SEQ ID NO: 181878 - DNA, 25 bp, Saccharomyces pastorianus
tcaatatcacagaaaaatcacctcc

SEQ ID NO: 181879 - DNA, 25 bp, Saccharomyces pastorianus
atcacagaaaaatcacctccaaaat

SEQ ID NO: 181880 - DNA, 25 bp, Saccharomyces pastorianus
tcacagaaaaatcacctccaaaatc

SEQ ID NO: 181881 - DNA, 25 bp, Saccharomyces pastorianus
cccaatccaaattaaaccagtgaga

SEQ ID NO: 181882 - DNA, 25 bp, Saccharomyces pastorianus
ttcatccaaagaaacatccaaattt

SEQ ID NO: 181883 - DNA, 25 bp, Saccharomyces pastorianus
tgacgacctagagttaaccaaccct

SEQ ID NO: 181884 - DNA, 25 bp, Saccharomyces pastorianus
atcatcaaatgacgacctagagtta

SEQ ID NO: 181885 - DNA, 25 bp, Saccharomyces pastorianus
ttaacgatgagttcgatctttcttc

SEQ ID NO: 181886 - DNA, 25 bp, Saccharomyces pastorianus
gtaagtcaagaattaattcatccaa

SEQ ID NO: 181887 - DNA, 25 bp, Saccharomyces pastorianus
gttcgatctttcttcatcatcaaat

SEQ ID NO: 181888 - DNA, 25 bp, Saccharomyces pastorianus
ctaaggtggatcatataagtaagtc

SEQ ID NO: 181889 - DNA, 25 bp, Saccharomyces pastorianus
gatctttcttcatcatcaaatgacg

SEQ ID NO: 181890 - DNA, 25 bp, Saccharomyces pastorianus
gagttcgatctttcttcatcatcaa

SEQ ID NO: 181891 - DNA, 25 bp, Saccharomyces pastorianus
ttccccaatccaaattaaaccagtg

SEQ ID NO: 181892 - DNA, 25 bp, Saccharomyces pastorianus
gaacgccacgtgtactacatagatt

SEQ ID NO: 181893 - DNA, 25 bp, Saccharomyces pastorianus
tctggtagaaggtttggtttactca

SEQ ID NO: 181894 - DNA, 25 bp, Saccharomyces pastorianus
actacatagatttacggtcaccaaa

SEQ ID NO: 181895 - DNA, 25 bp, Saccharomyces pastorianus
tgaagttactgatacctctgaggac

SEQ ID NO: 181896 - DNA, 25 bp, Saccharomyces pastorianus
acggtgtctatgatgtgtccttttc

SEQ ID NO: 181897 - DNA, 25 bp, Saccharomyces pastorianus
gtggacttccattctcgtaaagcag

SEQ ID NO: 181898 - DNA, 25 bp, Saccharomyces pastorianus
gaaagagttcaaccgaacgccacgt

SEQ ID NO: 181899 - DNA, 25 bp, Saccharomyces pastorianus
gatacctctgaggacggtgtctatg

SEQ ID NO: 181900 - DNA, 25 bp, Saccharomyces pastorianus
gcgccaaaggtaatgttttaggcaa

SEQ ID NO: 181901 - DNA, 25 bp, Saccharomyces pastorianus
tacttcatttctacacgaaagagtt

SEQ ID NO: 181902 - DNA, 25 bp, Saccharomyces pastorianus
gatgtgtccttttcttctggtagaa

SEQ ID NO: 181903 - DNA, 25 bp, Saccharomyces pastorianus
tggtgcacgggctttctgtatattg

SEQ ID NO: 181904 - DNA, 25 bp, Saccharomyces pastorianus
gtcgcttttcggagctacaattccc

SEQ ID NO: 181905 - DNA, 25 bp, Saccharomyces pastorianus
gcacgggctttctgtatattgaact

SEQ ID NO: 181906 - DNA, 25 bp, Saccharomyces pastorianus
tgaactttccgtcgcttttcggagc

SEQ ID NO: 181907 - DNA, 25 bp, Saccharomyces pastorianus
gcttttcggagctacaattccccta

SEQ ID NO: 181908 - DNA, 25 bp, Saccharomyces pastorianus
gtgcacgggctttctgtatattgaa

SEQ ID NO: 181909 - DNA, 25 bp, Saccharomyces pastorianus
cctacccggcttgtcggcattaagt

SEQ ID NO: 181910 - DNA, 25 bp, Saccharomyces pastorianus
tgtatattgaactttccgtcgcttt

SEQ ID NO: 181911 - DNA, 25 bp, Saccharomyces pastorianus
atattgaactttccgtcgcttttcg

SEQ ID NO: 181912 - DNA, 25 bp, Saccharomyces pastorianus
tttccgtcgcttttcggagctacaa

SEQ ID NO: 181913 - DNA, 25 bp, Saccharomyces pastorianus
gggctttctgtatattgaactttcc

SEQ ID NO: 181914 - DNA, 25 bp, Saccharomyces pastorianus
aagaaattggaagccgccgcccaag

SEQ ID NO: 181915 - DNA, 25 bp, Saccharomyces pastorianus
gaaggtgttgcaaaccccattatga

SEQ ID NO: 181916 - DNA, 25 bp, Saccharomyces pastorianus
attttacggagctgcaggtggtgcc

SEQ ID NO: 181917 - DNA, 25 bp, Saccharomyces pastorianus
tagatgcttcgcaagcggcctccac

SEQ ID NO: 181918 - DNA, 25 bp, Saccharomyces pastorianus
gaagctcaacgtgttcaagctaaga

SEQ ID NO: 181919 - DNA, 25 bp, Saccharomyces pastorianus
ttctgggtgctggagcaggccccac

SEQ ID NO: 181920 - DNA, 25 bp, Saccharomyces pastorianus
gaatcagctagaatcgtacgcgttt

SEQ ID NO: 181921 - DNA, 25 bp, Saccharomyces pastorianus
gctagaatcgtacgcgtttactttg

SEQ ID NO: 181922 - DNA, 25 bp, Saccharomyces pastorianus
ccgccgcccaagatgctataaattg

SEQ ID NO: 181923 - DNA, 25 bp, Saccharomyces pastorianus
tggtgccccaggagcaggcccagtt

SEQ ID NO: 181924 - DNA, 25 bp, Saccharomyces pastorianus
gcggcctccaccgaggaatacaagg

SEQ ID NO: 181925 - DNA, 25 bp, Saccharomyces pastorianus
gtgtacaccatcacgtggtttgttt

SEQ ID NO: 181926 - DNA, 25 bp, Saccharomyces pastorianus
cgtggtttgtttgaaggcatcggtc

SEQ ID NO: 181927 - DNA, 25 bp, Saccharomyces pastorianus
caacgtgtacaccatcacgtggttt

SEQ ID NO: 181928 - DNA, 25 bp, Saccharomyces pastorianus
ggtttgtttgaaggcatcggtccgc

SEQ ID NO: 181929 - DNA, 25 bp, Saccharomyces pastorianus
cacgtggtttgtttgaaggcatcgg

SEQ ID NO: 181930 - DNA, 25 bp, Saccharomyces pastorianus
gtggtttgtttgaaggcatcggtcc

SEQ ID NO: 181931 - DNA, 25 bp, Saccharomyces pastorianus
ccatcacgtggtttgtttgaaggca

SEQ ID NO: 181932 - DNA, 25 bp, Saccharomyces pastorianus
gaaacaacgtgtacaccatcacgtg

SEQ ID NO: 181933 - DNA, 25 bp, Saccharomyces pastorianus
accatcacgtggtttgtttgaaggc

SEQ ID NO: 181934 - DNA, 25 bp, Saccharomyces pastorianus
gtacaccatcacgtggtttgtttga

SEQ ID NO: 181935 - DNA, 25 bp, Saccharomyces pastorianus
atcacgtggtttgtttgaaggcatc

SEQ ID NO: 181936 - DNA, 25 bp, Saccharomyces pastorianus
gttctcagctagtgtcctttgcctt

SEQ ID NO: 181937 - DNA, 25 bp, Saccharomyces pastorianus
ctcctcttctttttcattctgtaat

SEQ ID NO: 181938 - DNA, 25 bp, Saccharomyces pastorianus
tgtaatttttcttgttccagtctct

SEQ ID NO: 181939 - DNA, 25 bp, Saccharomyces pastorianus
ttttgcagtctctctttttcttcct

SEQ ID NO: 181940 - DNA, 25 bp, Saccharomyces pastorianus
tctttttgtcttagcgcgttctcag

SEQ ID NO: 181941 - DNA, 25 bp, Saccharomyces pastorianus
ttctctacgctgttgctcttctaac

SEQ ID NO: 181942 - DNA, 25 bp, Saccharomyces pastorianus
gccaattgttgtaatctcttctttt

SEQ ID NO: 181943 - DNA, 25 bp, Saccharomyces pastorianus
ttgcgcttttgttcttctttctgtt

SEQ ID NO: 181944 - DNA, 25 bp, Saccharomyces pastorianus
gtcttttcatttcacgctcttctaa

SEQ ID NO: 181945 - DNA, 25 bp, Saccharomyces pastorianus
agtctcttttcttctctaacacgtt

SEQ ID NO: 181946 - DNA, 25 bp, Saccharomyces pastorianus
gctcttctaattccttttgcagtct

SEQ ID NO: 181947 - DNA, 25 bp, Saccharomyces pastorianus
agcccgtgtattcggttatgagata

SEQ ID NO: 181948 - DNA, 25 bp, Saccharomyces pastorianus
tcacaacgaacaaccagccaaaatt

SEQ ID NO: 181949 - DNA, 25 bp, Saccharomyces pastorianus
ggtaaggaagtacatctactctcta

SEQ ID NO: 181950 - DNA, 25 bp, Saccharomyces pastorianus
tcgtgtagtcatcaactcggtaagg

SEQ ID NO: 181951 - DNA, 25 bp, Saccharomyces pastorianus
taaaagggctgttgggttagctcgt

SEQ ID NO: 181952 - DNA, 25 bp, Saccharomyces pastorianus
tctctagcccgtgtattcggttatg

SEQ ID NO: 181953 - DNA, 25 bp, Saccharomyces pastorianus
tacatctactctctagcccgtgtat

SEQ ID NO: 181954 - DNA, 25 bp, Saccharomyces pastorianus
gatgacatcacaacgaacaaccagc

SEQ ID NO: 181955 - DNA, 25 bp, Saccharomyces pastorianus
tagctcgtgtagtcatcaactcggt

SEQ ID NO: 181956 - DNA, 25 bp, Saccharomyces pastorianus
aggaagtacatctactctctagccc

SEQ ID NO: 181957 - DNA, 25 bp, Saccharomyces pastorianus
gttgggttagctcgtgtagtcatca

SEQ ID NO: 181958 - DNA, 25 bp, Saccharomyces pastorianus
gacgattctacaacgttcgaagcat

SEQ ID NO: 181959 - DNA, 25 bp, Saccharomyces pastorianus
aaaagtctgtggaaggcgcttacat

SEQ ID NO: 181960 - DNA, 25 bp, Saccharomyces pastorianus
aggcgcttacattgacgattctaca

SEQ ID NO: 181961 - DNA, 25 bp, Saccharomyces pastorianus
gtggaaggcgcttacattgacgatt

SEQ ID NO: 181962 - DNA, 25 bp, Saccharomyces pastorianus
gttcgaagcatttcatctcgactct

SEQ ID NO: 181963 - DNA, 25 bp, Saccharomyces pastorianus
gtacccaacattaatcaatcacatg

SEQ ID NO: 181964 - DNA, 25 bp, Saccharomyces pastorianus
tacaacgttcgaagcatttcatctc

SEQ ID NO: 181965 - DNA, 25 bp, Saccharomyces pastorianus
tttcagtacccaacattaatcaatc

SEQ ID NO: 181966 - DNA, 25 bp, Saccharomyces pastorianus
gaagcatttcatctcgactctcgtt

SEQ ID NO: 181967 - DNA, 25 bp, Saccharomyces pastorianus
agaatataggatttcagtacccaac

SEQ ID NO: 181968 - DNA, 25 bp, Saccharomyces pastorianus
gcatttcatctcgactctcgtttat

SEQ ID NO: 181969 - DNA, 25 bp, Saccharomyces pastorianus
caattatagacttaccgaggtgcct

SEQ ID NO: 181970 - DNA, 25 bp, Saccharomyces pastorianus
ttttggcgcctatgtgtgttcgtat

SEQ ID NO: 181971 - DNA, 25 bp, Saccharomyces pastorianus
gaatgccaattatagacttaccgag

SEQ ID NO: 181972 - DNA, 25 bp, Saccharomyces pastorianus
ttggcgcctatgtgtgttcgtatgc

SEQ ID NO: 181973 - DNA, 25 bp, Saccharomyces pastorianus
tttggcgcctatgtgtgttcgtatg

SEQ ID NO: 181974 - DNA, 25 bp, Saccharomyces pastorianus
ccaattatagacttaccgaggtgcc

SEQ ID NO: 181975 - DNA, 25 bp, Saccharomyces pastorianus
gccaattatagacttaccgaggtgc

SEQ ID NO: 181976 - DNA, 25 bp, Saccharomyces pastorianus
tttttggcgcctatgtgtgttcgta

SEQ ID NO: 181977 - DNA, 25 bp, Saccharomyces pastorianus
atgccaattatagacttaccgaggt

SEQ ID NO: 181978 - DNA, 25 bp, Saccharomyces pastorianus
aatgccaattatagacttaccgagg

SEQ ID NO: 181979 - DNA, 25 bp, Saccharomyces pastorianus
gtcgtcactggagcgattggttttt

SEQ ID NO: 181980 - DNA, 25 bp, Saccharomyces pastorianus
agcctattctttatcattcttctat

SEQ ID NO: 181981 - DNA, 25 bp, Saccharomyces pastorianus
ggtgtcatcccagcgagaagcctat

SEQ ID NO: 181982 - DNA, 25 bp, Saccharomyces pastorianus
atctgcattatgttgtgtcgtcact

SEQ ID NO: 181983 - DNA, 25 bp, Saccharomyces pastorianus
tttgcacattcttcaggtgtcatcc

SEQ ID NO: 181984 - DNA, 25 bp, Saccharomyces pastorianus
gacaacctcattagttaccatcttg

SEQ ID NO: 181985 - DNA, 25 bp, Saccharomyces pastorianus
agttattactgtcgtgctctatctc

SEQ ID NO: 181986 - DNA, 25 bp, Saccharomyces pastorianus
gttcaatctatacgttcatccactc

SEQ ID NO: 181987 - DNA, 25 bp, Saccharomyces pastorianus
tgagctgtacttcatttactccagt

SEQ ID NO: 181988 - DNA, 25 bp, Saccharomyces pastorianus
gattccatatcaaccctggtacttg

SEQ ID NO: 181989 - DNA, 25 bp, Saccharomyces pastorianus
ttccgttgtcgtttgtgggttcaat

SEQ ID NO: 181990 - DNA, 25 bp, Saccharomyces pastorianus
ccctatattattttgtctctttcct

SEQ ID NO: 181991 - DNA, 25 bp, Saccharomyces pastorianus
tggttatacccgagtcattactttt

SEQ ID NO: 181992 - DNA, 25 bp, Saccharomyces pastorianus
taccggtgccttttctagtgatttt

SEQ ID NO: 181993 - DNA, 25 bp, Saccharomyces pastorianus
gaaaaatcaggcatcatcatcttat

SEQ ID NO: 181994 - DNA, 25 bp, Saccharomyces pastorianus
tagttccgtcggctgaaagttcaat

SEQ ID NO: 181995 - DNA, 25 bp, Saccharomyces pastorianus
ttcagtgcccatcaattgtgtacgt

SEQ ID NO: 181996 - DNA, 25 bp, Saccharomyces pastorianus
ctttctgccttctttcaggatagaa

SEQ ID NO: 181997 - DNA, 25 bp, Saccharomyces pastorianus
cgtcgctgctcttggttccaaaata

SEQ ID NO: 181998 - DNA, 25 bp, Saccharomyces pastorianus
atcttataacaacctagccgttcca

SEQ ID NO: 181999 - DNA, 25 bp, Saccharomyces pastorianus
atagagaggcacttctttctgcctt

SEQ ID NO: 182000 - DNA, 25 bp, Saccharomyces pastorianus
gtacgtatagccgtgccacaggaaa

SEQ ID NO: 182001 - DNA, 25 bp, Saccharomyces pastorianus
ttttgtgggagaccgagtctgattt

SEQ ID NO: 182002 - DNA, 25 bp, Saccharomyces pastorianus
gggtcaataatcttttgtgggagac

SEQ ID NO: 182003 - DNA, 25 bp, Saccharomyces pastorianus
ctgatttggtcagcgcaggtgcaga

SEQ ID NO: 182004 - DNA, 25 bp, Saccharomyces pastorianus
ttaagtcattgaacgcacataagga

SEQ ID NO: 182005 - DNA, 25 bp, Saccharomyces pastorianus
ataatcttttgtgggagaccgagtc

SEQ ID NO: 182006 - DNA, 25 bp, Saccharomyces pastorianus
ttggtcagcgcaggtgcagacgctt

SEQ ID NO: 182007 - DNA, 25 bp, Saccharomyces pastorianus
accgagtctgatttggtcagcgcag

SEQ ID NO: 182008 - DNA, 25 bp, Saccharomyces pastorianus
agtctgatttggtcagcgcaggtgc

SEQ ID NO: 182009 - DNA, 25 bp, Saccharomyces pastorianus
gtcattgaacgcacataaggacggg

SEQ ID NO: 182010 - DNA, 25 bp, Saccharomyces pastorianus
atcttttgtgggagaccgagtctga

SEQ ID NO: 182011 - DNA, 25 bp, Saccharomyces pastorianus
gattattaagtcattgaacgcacat

SEQ ID NO: 182012 - DNA, 25 bp, Saccharomyces pastorianus
atttgctggccacccatggtaatga

SEQ ID NO: 182013 - DNA, 25 bp, Saccharomyces pastorianus
aaaattcgagctctttggcggcaac

SEQ ID NO: 182014 - DNA, 25 bp, Saccharomyces pastorianus
gatcagcgagttggtttcatgcgaa

SEQ ID NO: 182015 - DNA, 25 bp, Saccharomyces pastorianus
aagtggactggcatacccgttggcg

SEQ ID NO: 182016 - DNA, 25 bp, Saccharomyces pastorianus
aacttttaatgtgccttcctccgag

SEQ ID NO: 182017 - DNA, 25 bp, Saccharomyces pastorianus
tcaggtgcccgaatctcaggtgaaa

SEQ ID NO: 182018 - DNA, 25 bp, Saccharomyces pastorianus
gagctctacgaaacgttccttgata

SEQ ID NO: 182019 - DNA, 25 bp, Saccharomyces pastorianus
ttaccgaaatcaaggactccgcttc

SEQ ID NO: 182020 - DNA, 25 bp, Saccharomyces pastorianus
ggaccagatcagcacaatttttcaa

SEQ ID NO: 182021 - DNA, 25 bp, Saccharomyces pastorianus
tcgcgtgcgcgctaattttgaagaa

SEQ ID NO: 182022 - DNA, 25 bp, Saccharomyces pastorianus
aagcaacgcatattggcctggacca

SEQ ID NO: 182023 - DNA, 25 bp, Saccharomyces pastorianus
ttaacaacagaaatgcaaagcatgc

SEQ ID NO: 182024 - DNA, 25 bp, Saccharomyces pastorianus
gggcaattatctgcttaacaacaga

SEQ ID NO: 182025 - DNA, 25 bp, Saccharomyces pastorianus
tttgggcaattatctgcttaacaac

SEQ ID NO: 182026 - DNA, 25 bp, Saccharomyces pastorianus
gcaattatctgcttaacaacagaaa

SEQ ID NO: 182027 - DNA, 25 bp, Saccharomyces pastorianus
ctttgggcaattatctgcttaacaa

SEQ ID NO: 182028 - DNA, 25 bp, Saccharomyces pastorianus
ttgggcaattatctgcttaacaaca

SEQ ID NO: 182029 - DNA, 25 bp, Saccharomyces pastorianus
atctgcttaacaacagaaatgcaaa

SEQ ID NO: 182030 - DNA, 25 bp, Saccharomyces pastorianus
gctttgggcaattatctgcttaaca

SEQ ID NO: 182031 - DNA, 25 bp, Saccharomyces pastorianus
taacaacagaaatgcaaagcatgcg

SEQ ID NO: 182032 - DNA, 25 bp, Saccharomyces pastorianus
ggcaattatctgcttaacaacagaa

SEQ ID NO: 182033 - DNA, 25 bp, Saccharomyces pastorianus
tgggcaattatctgcttaacaacag

SEQ ID NO: 182034 - DNA, 25 bp, Saccharomyces pastorianus
aaatccacattcttatcagatatca

SEQ ID NO: 182035 - DNA, 25 bp, Saccharomyces pastorianus
acataccatattatagccttaatca

SEQ ID NO: 182036 - DNA, 25 bp, Saccharomyces pastorianus
catattatagccttaatcacaatgg

SEQ ID NO: 182037 - DNA, 25 bp, Saccharomyces pastorianus
taccatattatagccttaatcacaa

SEQ ID NO: 182038 - DNA, 25 bp, Saccharomyces pastorianus
gtatatctacataccatattatagc

SEQ ID NO: 182039 - DNA, 25 bp, Saccharomyces pastorianus
cataccatattatagccttaatcac

SEQ ID NO: 182040 - DNA, 25 bp, Saccharomyces pastorianus
tatatctacataccatattatagcc

SEQ ID NO: 182041 - DNA, 25 bp, Saccharomyces pastorianus
tctacataccatattatagccttaa

SEQ ID NO: 182042 - DNA, 25 bp, Saccharomyces pastorianus
ataccatattatagccttaatcaca

SEQ ID NO: 182043 - DNA, 25 bp, Saccharomyces pastorianus
atctacataccatattatagcctta

SEQ ID NO: 182044 - DNA, 25 bp, Saccharomyces pastorianus
aaaatccacattcttatcagatatc

SEQ ID NO: 182045 - DNA, 25 bp, Saccharomyces pastorianus
attcggatccgattccaatagcgat

SEQ ID NO: 182046 - DNA, 25 bp, Saccharomyces pastorianus
ttacaagcgtatctatcgtccctga

SEQ ID NO: 182047 - DNA, 25 bp, Saccharomyces pastorianus
atcctcaaacttccaatatgctacc

SEQ ID NO: 182048 - DNA, 25 bp, Saccharomyces pastorianus
gtatttcaacagcaggcctttctac

SEQ ID NO: 182049 - DNA, 25 bp, Saccharomyces pastorianus
aggcctttctacaacagcaactagc

SEQ ID NO: 182050 - DNA, 25 bp, Saccharomyces pastorianus
acaacagcgggagcagccacaacaa

SEQ ID NO: 182051 - DNA, 25 bp, Saccharomyces pastorianus
tcgtccctgaacaccgatactatga

SEQ ID NO: 182052 - DNA, 25 bp, Saccharomyces pastorianus
gcaacagcatgtatcacgaccactg

SEQ ID NO: 182053 - DNA, 25 bp, Saccharomyces pastorianus
tagcgatgacgcaaagcccaactcc

SEQ ID NO: 182054 - DNA, 25 bp, Saccharomyces pastorianus
gccacaacaacatattacttctcca

SEQ ID NO: 182055 - DNA, 25 bp, Saccharomyces pastorianus
aaatggctcttcttcgggcgatata

SEQ ID NO: 182056 - DNA, 25 bp, Saccharomyces pastorianus
tgaaagtgctattgggttttggtta

SEQ ID NO: 182057 - DNA, 25 bp, Saccharomyces pastorianus
aaaggcaatctgtgaaagtgctatt

SEQ ID NO: 182058 - DNA, 25 bp, Saccharomyces pastorianus
ggtagatgcatattgcagaaaggca

SEQ ID NO: 182059 - DNA, 25 bp, Saccharomyces pastorianus
gtaaagtcgaattgggtagatgcat

SEQ ID NO: 182060 - DNA, 25 bp, Saccharomyces pastorianus
gtttatttgcaagttgtaaagtcga

SEQ ID NO: 182061 - DNA, 25 bp, Saccharomyces pastorianus
tttggttaaaccacggagtagatgg

SEQ ID NO: 182062 - DNA, 25 bp, Saccharomyces pastorianus
cgaattgggtagatgcatattgcag

SEQ ID NO: 182063 - DNA, 25 bp, Saccharomyces pastorianus
atctgtgaaagtgctattgggtttt

SEQ ID NO: 182064 - DNA, 25 bp, Saccharomyces pastorianus
tacctacgtttatttgcaagttgta

SEQ ID NO: 182065 - DNA, 25 bp, Saccharomyces pastorianus
tatacctacgtttatttgcaagttg

SEQ ID NO: 182066 - DNA, 25 bp, Saccharomyces pastorianus
gaactatacctacgtttatttgcaa

SEQ ID NO: 182067 - DNA, 25 bp, Saccharomyces pastorianus
aggtatgagaagctttcatcgaagg

SEQ ID NO: 182068 - DNA, 25 bp, Saccharomyces pastorianus
gtagtcacactaccaatatattatc

SEQ ID NO: 182069 - DNA, 25 bp, Saccharomyces pastorianus
tgttagaagatgacataaggtatga

SEQ ID NO: 182070 - DNA, 25 bp, Saccharomyces pastorianus
gtgttagaagatgacataaggtatg

SEQ ID NO: 182071 - DNA, 25 bp, Saccharomyces pastorianus
gtcacactaccaatatattatcata

SEQ ID NO: 182072 - DNA, 25 bp, Saccharomyces pastorianus
gttagaagatgacataaggtatgag

SEQ ID NO: 182073 - DNA, 25 bp, Saccharomyces pastorianus
actagtagtcacactaccaatatat

SEQ ID NO: 182074 - DNA, 25 bp, Saccharomyces pastorianus
ggtatgagaagctttcatcgaaggt

SEQ ID NO: 182075 - DNA, 25 bp, Saccharomyces pastorianus
ctagtagtcacactaccaatatatt

SEQ ID NO: 182076 - DNA, 25 bp, Saccharomyces pastorianus
gtatgagaagctttcatcgaaggta

SEQ ID NO: 182077 - DNA, 25 bp, Saccharomyces pastorianus
aactagtagtcacactaccaatata

SEQ ID NO: 182078 - DNA, 25 bp, Saccharomyces pastorianus
gagcgacctggtaaaatcaccctaa

SEQ ID NO: 182079 - DNA, 25 bp, Saccharomyces pastorianus
aatcatcaggaatagtggccctcat

SEQ ID NO: 182080 - DNA, 25 bp, Saccharomyces pastorianus
atcaccctaactaatgtcagcatcc

SEQ ID NO: 182081 - DNA, 25 bp, Saccharomyces pastorianus
gtaatcatccagatcaaggcgacag

SEQ ID NO: 182082 - DNA, 25 bp, Saccharomyces pastorianus
acacctccctttgatgggaccttga

SEQ ID NO: 182083 - DNA, 25 bp, Saccharomyces pastorianus
atagggtggcacttgagcccggaat

SEQ ID NO: 182084 - DNA, 25 bp, Saccharomyces pastorianus
gcgggtcagatatccattactatac

SEQ ID NO: 182085 - DNA, 25 bp, Saccharomyces pastorianus
atacctgacaggttttcaccggaga

SEQ ID NO: 182086 - DNA, 25 bp, Saccharomyces pastorianus
tttaaaatttgctgcgacacctccc

SEQ ID NO: 182087 - DNA, 25 bp, Saccharomyces pastorianus
ggcagatacaacctggaccccaatt

SEQ ID NO: 182088 - DNA, 25 bp, Saccharomyces pastorianus
gaagctattgttctagagcgacctg

SEQ ID NO: 182089 - DNA, 25 bp, Saccharomyces pastorianus
tacgcataacgcccatcattatcca

SEQ ID NO: 182090 - DNA, 25 bp, Saccharomyces pastorianus
actctcacattccactccatcaccc

SEQ ID NO: 182091 - DNA, 25 bp, Saccharomyces pastorianus
gcatatgcacacggatgctacagta

SEQ ID NO: 182092 - DNA, 25 bp, Saccharomyces pastorianus
tccatcacccatctctcaccatcag

SEQ ID NO: 182093 - DNA, 25 bp, Saccharomyces pastorianus
acgcataacgcccatcattatccac

SEQ ID NO: 182094 - DNA, 25 bp, Saccharomyces pastorianus
tactctcacattccactccatcacc

SEQ ID NO: 182095 - DNA, 25 bp, Saccharomyces pastorianus
catcacccatctctcaccatcagta

SEQ ID NO: 182096 - DNA, 25 bp, Saccharomyces pastorianus
ttacgcataacgcccatcattatcc

SEQ ID NO: 182097 - DNA, 25 bp, Saccharomyces pastorianus
ccatcacccatctctcaccatcagt

SEQ ID NO: 182098 - DNA, 25 bp, Saccharomyces pastorianus
atctctcaccatcagtaccaaatgc

SEQ ID NO: 182099 - DNA, 25 bp, Saccharomyces pastorianus
cgcataacgcccatcattatccaca

SEQ ID NO: 182100 - DNA, 25 bp, Saccharomyces pastorianus
accagctgcaagttttagcgggaat

SEQ ID NO: 182101 - DNA, 25 bp, Saccharomyces pastorianus
tagtaacaacataccagctgcaagt

SEQ ID NO: 182102 - DNA, 25 bp, Saccharomyces pastorianus
tacataccgtattacccgttagcac

SEQ ID NO: 182103 - DNA, 25 bp, Saccharomyces pastorianus
taccgatatacagtcccaacaatta

SEQ ID NO: 182104 - DNA, 25 bp, Saccharomyces pastorianus
gcgggaataacactaccgatataca

SEQ ID NO: 182105 - DNA, 25 bp, Saccharomyces pastorianus
ccgttagcacaccaagccatagtaa

SEQ ID NO: 182106 - DNA, 25 bp, Saccharomyces pastorianus
tatgtcaaacaccaattaatcccgt

SEQ ID NO: 182107 - DNA, 25 bp, Saccharomyces pastorianus
gaggacattcctgatagtatattag

SEQ ID NO: 182108 - DNA, 25 bp, Saccharomyces pastorianus
attagagctgaagatcctgatcgat

SEQ ID NO: 182109 - DNA, 25 bp, Saccharomyces pastorianus
ttaatcccgttactcctgtgctaga

SEQ ID NO: 182110 - DNA, 25 bp, Saccharomyces pastorianus
cgagagttactagtttacataccgt

SEQ ID NO: 182111 - DNA, 25 bp, Saccharomyces pastorianus
tggagcctgtactgggattttggca

SEQ ID NO: 182112 - DNA, 25 bp, Saccharomyces pastorianus
gccttgcatttatttccgccaaaaa

SEQ ID NO: 182113 - DNA, 25 bp, Saccharomyces pastorianus
gtgacgatacagatgcgttgcccat

SEQ ID NO: 182114 - DNA, 25 bp, Saccharomyces pastorianus
gatctcctgtcgttgaagtaccagt

SEQ ID NO: 182115 - DNA, 25 bp, Saccharomyces pastorianus
tttcgatatctgagctaggtaccgg

SEQ ID NO: 182116 - DNA, 25 bp, Saccharomyces pastorianus
ctaggtaccggagctgacatcattg

SEQ ID NO: 182117 - DNA, 25 bp, Saccharomyces pastorianus
gaagtaccagtaactgtcccttgct

SEQ ID NO: 182118 - DNA, 25 bp, Saccharomyces pastorianus
aatcttttcagatcgatctcctgtc

SEQ ID NO: 182119 - DNA, 25 bp, Saccharomyces pastorianus
gatgcgttgcccataggtggtttag

SEQ ID NO: 182120 - DNA, 25 bp, Saccharomyces pastorianus
attggtgcacgtgaagctgccttaa

SEQ ID NO: 182121 - DNA, 25 bp, Saccharomyces pastorianus
tgctcagatcgccttgcatttattt

SEQ ID NO: 182122 - DNA, 25 bp, Saccharomyces pastorianus
gttttcgagctttgagggtacgcaa

SEQ ID NO: 182123 - DNA, 25 bp, Saccharomyces pastorianus
aaagcatcacgttttcaataggcag

SEQ ID NO: 182124 - DNA, 25 bp, Saccharomyces pastorianus
gggtgcacaagacgcatatgtatca

SEQ ID NO: 182125 - DNA, 25 bp, Saccharomyces pastorianus
gagggtacgcaagtactcccagata

SEQ ID NO: 182126 - DNA, 25 bp, Saccharomyces pastorianus
tcaataggcagtcgtgggtgcacaa

SEQ ID NO: 182127 - DNA, 25 bp, Saccharomyces pastorianus
agagcaccttcctacatttgatgtt

SEQ ID NO: 182128 - DNA, 25 bp, Saccharomyces pastorianus
gatgtagacaaacgttttcgagctt

SEQ ID NO: 182129 - DNA, 25 bp, Saccharomyces pastorianus
caatcattacagttgtgtttggcat

SEQ ID NO: 182130 - DNA, 25 bp, Saccharomyces pastorianus
aggcgtaacagggatctcttggaaa

SEQ ID NO: 182131 - DNA, 25 bp, Saccharomyces pastorianus
gtgtttggcatgtttattttacttc

SEQ ID NO: 182132 - DNA, 25 bp, Saccharomyces pastorianus
gtactcccagatatgtcttttactt

SEQ ID NO: 182133 - DNA, 25 bp, Saccharomyces pastorianus
aaagaggatcgcatagatttgaaga

SEQ ID NO: 182134 - DNA, 25 bp, Saccharomyces pastorianus
gaaagtgccctaaaagagcctatta

SEQ ID NO: 182135 - DNA, 25 bp, Saccharomyces pastorianus
gatttgaagaatacaccgcctcaga

SEQ ID NO: 182136 - DNA, 25 bp, Saccharomyces pastorianus
atcactacgttcaatcatgcccagg

SEQ ID NO: 182137 - DNA, 25 bp, Saccharomyces pastorianus
gacatgcagatgagtgaacaacgat

SEQ ID NO: 182138 - DNA, 25 bp, Saccharomyces pastorianus
gaattcgtgcagaaaagcccgaccc

SEQ ID NO: 182139 - DNA, 25 bp, Saccharomyces pastorianus
gggtgattccgatttatacaatcca

SEQ ID NO: 182140 - DNA, 25 bp, Saccharomyces pastorianus
acaccgcctcagaagaagtcaaaaa

SEQ ID NO: 182141 - DNA, 25 bp, Saccharomyces pastorianus
gtataggatccaaaaagttgctttt

SEQ ID NO: 182142 - DNA, 25 bp, Saccharomyces pastorianus
gaatacaccgcctcagaagaagtca

SEQ ID NO: 182143 - DNA, 25 bp, Saccharomyces pastorianus
aagcccgacccatcaacaatgaatg

SEQ ID NO: 182144 - DNA, 25 bp, Saccharomyces pastorianus
aaacaagacgcatccaactgtacac

SEQ ID NO: 182145 - DNA, 25 bp, Saccharomyces pastorianus
atacgtcgacgataaaacaagacgc

SEQ ID NO: 182146 - DNA, 25 bp, Saccharomyces pastorianus
cgataaaacaagacgcatccaactg

SEQ ID NO: 182147 - DNA, 25 bp, Saccharomyces pastorianus
aaaacaagacgcatccaactgtaca

SEQ ID NO: 182148 - DNA, 25 bp, Saccharomyces pastorianus
agacgcatccaactgtacactgatc

SEQ ID NO: 182149 - DNA, 25 bp, Saccharomyces pastorianus
tcgacgataaaacaagacgcatcca

SEQ ID NO: 182150 - DNA, 25 bp, Saccharomyces pastorianus
taaaacaagacgcatccaactgtac

SEQ ID NO: 182151 - DNA, 25 bp, Saccharomyces pastorianus
gataaaacaagacgcatccaactgt

SEQ ID NO: 182152 - DNA, 25 bp, Saccharomyces pastorianus
cgacgataaaacaagacgcatccaa

SEQ ID NO: 182153 - DNA, 25 bp, Saccharomyces pastorianus
gacgataaaacaagacgcatccaac

SEQ ID NO: 182154 - DNA, 25 bp, Saccharomyces pastorianus
gtcgacgataaaacaagacgcatcc

SEQ ID NO: 182155 - DNA, 25 bp, Saccharomyces pastorianus
gctgatgtaatcttaacaagaaata

SEQ ID NO: 182156 - DNA, 25 bp, Saccharomyces pastorianus
gatgtaatcttaacaagaaatagtg

SEQ ID NO: 182157 - DNA, 25 bp, Saccharomyces pastorianus
tagtgctgatgtaatcttaacaaga

SEQ ID NO: 182158 - DNA, 25 bp, Saccharomyces pastorianus
tgctgatgtaatcttaacaagaaat

SEQ ID NO: 182159 - DNA, 25 bp, Saccharomyces pastorianus
ctgatgtaatcttaacaagaaatag

SEQ ID NO: 182160 - DNA, 25 bp, Saccharomyces pastorianus
ttagtgctgatgtaatcttaacaag

SEQ ID NO: 182161 - DNA, 25 bp, Saccharomyces pastorianus
ccagcagcgattgaagttaatttga

SEQ ID NO: 182162 - DNA, 25 bp, Saccharomyces pastorianus
agtgctgatgtaatcttaacaagaa

SEQ ID NO: 182163 - DNA, 25 bp, Saccharomyces pastorianus
gtgctgatgtaatcttaacaagaaa

SEQ ID NO: 182164 - DNA, 25 bp, Saccharomyces pastorianus
gttagtgctgatgtaatcttaacaa

SEQ ID NO: 182165 - DNA, 25 bp, Saccharomyces pastorianus
cagcgattgaagttaatttgaccat

SEQ ID NO: 182166 - DNA, 25 bp, Saccharomyces pastorianus
gaatccttacaatggacttgatatt

SEQ ID NO: 182167 - DNA, 25 bp, Saccharomyces pastorianus
ttagaatccttacaatggacttgat

SEQ ID NO: 182168 - DNA, 25 bp, Saccharomyces pastorianus
gatattagaatccttacaatggact

SEQ ID NO: 182169 - DNA, 25 bp, Saccharomyces pastorianus
tcctcgaggatattagaatccttac

SEQ ID NO: 182170 - DNA, 25 bp, Saccharomyces pastorianus
tccttacaatggacttgatatttct

SEQ ID NO: 182171 - DNA, 25 bp, Saccharomyces pastorianus
agaatccttacaatggacttgatat

SEQ ID NO: 182172 - DNA, 25 bp, Saccharomyces pastorianus
tctcctcgaggatattagaatcctt

SEQ ID NO: 182173 - DNA, 25 bp, Saccharomyces pastorianus
ttacaatggacttgatatttctaca

SEQ ID NO: 182174 - DNA, 25 bp, Saccharomyces pastorianus
attagaatccttacaatggacttga

SEQ ID NO: 182175 - DNA, 25 bp, Saccharomyces pastorianus
tacaatggacttgatatttctacat

SEQ ID NO: 182176 - DNA, 25 bp, Saccharomyces pastorianus
cttacaatggacttgatatttctac

SEQ ID NO: 182177 - DNA, 25 bp, Saccharomyces pastorianus
aacagtgattgatgaccaagtcggt

SEQ ID NO: 182178 - DNA, 25 bp, Saccharomyces pastorianus
gtcggtgatgaatttcataccaagc

SEQ ID NO: 182179 - DNA, 25 bp, Saccharomyces pastorianus
ttcgctggaacagtgattgatgacc

SEQ ID NO: 182180 - DNA, 25 bp, Saccharomyces pastorianus
agtcggtgatgaatttcataccaag

SEQ ID NO: 182181 - DNA, 25 bp, Saccharomyces pastorianus
cggtgatgaatttcataccaagctt

SEQ ID NO: 182182 - DNA, 25 bp, Saccharomyces pastorianus
ggtgatgaatttcataccaagctta

SEQ ID NO: 182183 - DNA, 25 bp, Saccharomyces pastorianus
tcggtgatgaatttcataccaagct

SEQ ID NO: 182184 - DNA, 25 bp, Saccharomyces pastorianus
caagtcggtgatgaatttcatacca

SEQ ID NO: 182185 - DNA, 25 bp, Saccharomyces pastorianus
aagtcggtgatgaatttcataccaa

SEQ ID NO: 182186 - DNA, 25 bp, Saccharomyces pastorianus
tgaatttcataccaagcttatgtgt

SEQ ID NO: 182187 - DNA, 25 bp, Saccharomyces pastorianus
taccaagcttatgtgtcttttcgat

SEQ ID NO: 182188 - DNA, 25 bp, Saccharomyces pastorianus
ctcttctgcattttcatcgttttca

SEQ ID NO: 182189 - DNA, 25 bp, Saccharomyces pastorianus
agcatcttgctttaactcttcttca

SEQ ID NO: 182190 - DNA, 25 bp, Saccharomyces pastorianus
aggttcgtcgttttcattatcactt

SEQ ID NO: 182191 - DNA, 25 bp, Saccharomyces pastorianus
tccaacctcttccttgtttaaatca

SEQ ID NO: 182192 - DNA, 25 bp, Saccharomyces pastorianus
tgttttcttccatagcagcatcttg

SEQ ID NO: 182193 - DNA, 25 bp, Saccharomyces pastorianus
aacatcttcgtctgattcttcatgc

SEQ ID NO: 182194 - DNA, 25 bp, Saccharomyces pastorianus
accggattcttgtttgacttcttcg

SEQ ID NO: 182195 - DNA, 25 bp, Saccharomyces pastorianus
atcttcaggtgcatttgggtcctca

SEQ ID NO: 182196 - DNA, 25 bp, Saccharomyces pastorianus
atcaagaccttctgtattctgctca

SEQ ID NO: 182197 - DNA, 25 bp, Saccharomyces pastorianus
tcctttccctcatcattagtcatat

SEQ ID NO: 182198 - DNA, 25 bp, Saccharomyces pastorianus
ttcttcatcagacatggcttgctct

SEQ ID NO: 182199 - DNA, 25 bp, Saccharomyces pastorianus
aaccattggacttcacatccgaaca

SEQ ID NO: 182200 - DNA, 25 bp, Saccharomyces pastorianus
aacagcagcaaccattggacttcac

SEQ ID NO: 182201 - DNA, 25 bp, Saccharomyces pastorianus
agcaaccattggacttcacatccga

SEQ ID NO: 182202 - DNA, 25 bp, Saccharomyces pastorianus
aatccttgagcaatgccaggaagag

SEQ ID NO: 182203 - DNA, 25 bp, Saccharomyces pastorianus
agaacaatccttgagcaatgccagg

SEQ ID NO: 182204 - DNA, 25 bp, Saccharomyces pastorianus
tggacttcacatccgaacacacatt

SEQ ID NO: 182205 - DNA, 25 bp, Saccharomyces pastorianus
gccgaaatggaacagcaagtggaaa

SEQ ID NO: 182206 - DNA, 25 bp, Saccharomyces pastorianus
gaagatgatcattcgacttcgcaac

SEQ ID NO: 182207 - DNA, 25 bp, Saccharomyces pastorianus
gatcattcgacttcgcaacagcagc

SEQ ID NO: 182208 - DNA, 25 bp, Saccharomyces pastorianus
gaagttagaacaatccttgagcaat

SEQ ID NO: 182209 - DNA, 25 bp, Saccharomyces pastorianus
gatgatcattcgacttcgcaacagc

SEQ ID NO: 182210 - DNA, 25 bp, Saccharomyces pastorianus
gcttccaaatggaggatcttgttac

SEQ ID NO: 182211 - DNA, 25 bp, Saccharomyces pastorianus
gaatgtccgtttcaatggagcacaa

SEQ ID NO: 182212 - DNA, 25 bp, Saccharomyces pastorianus
tagaggctggaatgtccgtttcaat

SEQ ID NO: 182213 - DNA, 25 bp, Saccharomyces pastorianus
gacaaagctgcggaagattctcaca

SEQ ID NO: 182214 - DNA, 25 bp, Saccharomyces pastorianus
gtgacgaccaagaggaggcttccga

SEQ ID NO: 182215 - DNA, 25 bp, Saccharomyces pastorianus
ggcttccgagattttgggcttccaa

SEQ ID NO: 182216 - DNA, 25 bp, Saccharomyces pastorianus
atattaatgagtacactggcggccc

SEQ ID NO: 182217 - DNA, 25 bp, Saccharomyces pastorianus
actgtagtgcagaatggagctaacc

SEQ ID NO: 182218 - DNA, 25 bp, Saccharomyces pastorianus
gattctcacaaacacagaactgtag

SEQ ID NO: 182219 - DNA, 25 bp, Saccharomyces pastorianus
aatggtaaccggcagcaagagcaac

SEQ ID NO: 182220 - DNA, 25 bp, Saccharomyces pastorianus
gatcttgttacgatgggatgtatct

SEQ ID NO: 182221 - DNA, 25 bp, Saccharomyces pastorianus
gttgctactaaagttcctcaatttt

SEQ ID NO: 182222 - DNA, 25 bp, Saccharomyces pastorianus
agctgttttcaatttagcctccaag

SEQ ID NO: 182223 - DNA, 25 bp, Saccharomyces pastorianus
accatgaacttccatgtaccactac

SEQ ID NO: 182224 - DNA, 25 bp, Saccharomyces pastorianus
tatagttccaccagaagtccgttcc

SEQ ID NO: 182225 - DNA, 25 bp, Saccharomyces pastorianus
atctcatgacgttatagttccacca

SEQ ID NO: 182226 - DNA, 25 bp, Saccharomyces pastorianus
atacatctcgagaatacttgggcca

SEQ ID NO: 182227 - DNA, 25 bp, Saccharomyces pastorianus
attgattttgctatcccattgttca

SEQ ID NO: 182228 - DNA, 25 bp, Saccharomyces pastorianus
agcctccaagagagctgagagcact

SEQ ID NO: 182229 - DNA, 25 bp, Saccharomyces pastorianus
tcaatgaacctcaaacggctttgtt

SEQ ID NO: 182230 - DNA, 25 bp, Saccharomyces pastorianus
ttggactgctattcaaagtaccatg

SEQ ID NO: 182231 - DNA, 25 bp, Saccharomyces pastorianus
gagagcactgacgatgttgactata

SEQ ID NO: 182232 - DNA, 25 bp, Saccharomyces pastorianus
atctatatttctacaacctaatatt

SEQ ID NO: 182233 - DNA, 25 bp, Saccharomyces pastorianus
tatatttctacaacctaatattacg

SEQ ID NO: 182234 - DNA, 25 bp, Saccharomyces pastorianus
caacctaatattacgattattcctc

SEQ ID NO: 182235 - DNA, 25 bp, Saccharomyces pastorianus
aatctatatttctacaacctaatat

SEQ ID NO: 182236 - DNA, 25 bp, Saccharomyces pastorianus
ttctacaacctaatattacgattat

SEQ ID NO: 182237 - DNA, 25 bp, Saccharomyces pastorianus
gaatctatatttctacaacctaata

SEQ ID NO: 182238 - DNA, 25 bp, Saccharomyces pastorianus
ctatatttctacaacctaatattac

SEQ ID NO: 182239 - DNA, 25 bp, Saccharomyces pastorianus
tctacaacctaatattacgattatt

SEQ ID NO: 182240 - DNA, 25 bp, Saccharomyces pastorianus
acaacctaatattacgattattcct

SEQ ID NO: 182241 - DNA, 25 bp, Saccharomyces pastorianus
ctacaacctaatattacgattattc

SEQ ID NO: 182242 - DNA, 25 bp, Saccharomyces pastorianus
tacaacctaatattacgattattcc

SEQ ID NO: 182243 - DNA, 25 bp, Saccharomyces pastorianus
tctgctgcgttttgttagctttgtc

SEQ ID NO: 182244 - DNA, 25 bp, Saccharomyces pastorianus
attctgctgcgttttgttagctttg

SEQ ID NO: 182245 - DNA, 25 bp, Saccharomyces pastorianus
ttgttagctttgtccactattgcaa

SEQ ID NO: 182246 - DNA, 25 bp, Saccharomyces pastorianus
gttttgttagctttgtccactattg

SEQ ID NO: 182247 - DNA, 25 bp, Saccharomyces pastorianus
ctgcgttttgttagctttgtccact

SEQ ID NO: 182248 - DNA, 25 bp, Saccharomyces pastorianus
tgctgcgttttgttagctttgtcca

SEQ ID NO: 182249 - DNA, 25 bp, Saccharomyces pastorianus
gttagctttgtccactattgcaaat

SEQ ID NO: 182250 - DNA, 25 bp, Saccharomyces pastorianus
tttgttagctttgtccactattgca

SEQ ID NO: 182251 - DNA, 25 bp, Saccharomyces pastorianus
gcgttttgttagctttgtccactat

SEQ ID NO: 182252 - DNA, 25 bp, Saccharomyces pastorianus
tgcgttttgttagctttgtccacta

SEQ ID NO: 182253 - DNA, 25 bp, Saccharomyces pastorianus
caattctgctgcgttttgttagctt

SEQ ID NO: 182254 - DNA, 25 bp, Saccharomyces pastorianus
caatttgtaaaaaatgccatcggtt

SEQ ID NO: 182255 - DNA, 25 bp, Saccharomyces pastorianus
atgccatcggttgttatggacccca

SEQ ID NO: 182256 - DNA, 25 bp, Saccharomyces pastorianus
cactgcttcctacgataaagagaac

SEQ ID NO: 182257 - DNA, 25 bp, Saccharomyces pastorianus
aaactggaaatcacatccgacggag

SEQ ID NO: 182258 - DNA, 25 bp, Saccharomyces pastorianus
taatgtgtgggtgcggtaccgttaa

SEQ ID NO: 182259 - DNA, 25 bp, Saccharomyces pastorianus
cgttttaatattggcgccgatccta

SEQ ID NO: 182260 - DNA, 25 bp, Saccharomyces pastorianus
atattggcgccgatcctaattacag

SEQ ID NO: 182261 - DNA, 25 bp, Saccharomyces pastorianus
gccatcggttgttatggaccccaaa

SEQ ID NO: 182262 - DNA, 25 bp, Saccharomyces pastorianus
taaacgttttaatattggcgccgat

SEQ ID NO: 182263 - DNA, 25 bp, Saccharomyces pastorianus
gaaaaccaagacatcactgcttcct

SEQ ID NO: 182264 - DNA, 25 bp, Saccharomyces pastorianus
gacatcactgcttcctacgataaag

SEQ ID NO: 182265 - DNA, 25 bp, Saccharomyces pastorianus
gatctgtcattgtatttcaaaccaa

SEQ ID NO: 182266 - DNA, 25 bp, Saccharomyces pastorianus
gttagcggcgacttggttctttgca

SEQ ID NO: 182267 - DNA, 25 bp, Saccharomyces pastorianus
gacttggttctttgcagcatcacca

SEQ ID NO: 182268 - DNA, 25 bp, Saccharomyces pastorianus
aaccaatcaatctcttaatgtcgaa

SEQ ID NO: 182269 - DNA, 25 bp, Saccharomyces pastorianus
atcaccaatcaacctttcgtcgtcg

SEQ ID NO: 182270 - DNA, 25 bp, Saccharomyces pastorianus
attctattaccttgttcattggcaa

SEQ ID NO: 182271 - DNA, 25 bp, Saccharomyces pastorianus
tcgtcgtcggtaaaagccacgtaag

SEQ ID NO: 182272 - DNA, 25 bp, Saccharomyces pastorianus
ggagttattctattaccttgttcat

SEQ ID NO: 182273 - DNA, 25 bp, Saccharomyces pastorianus
gccacgtaagatggagttattctat

SEQ ID NO: 182274 - DNA, 25 bp, Saccharomyces pastorianus
atatctttttgaacagatctgtcat

SEQ ID NO: 182275 - DNA, 25 bp, Saccharomyces pastorianus
gcaagaatttcagtcttaccgttct

SEQ ID NO: 182276 - DNA, 25 bp, Saccharomyces pastorianus
tcttgggtgactctaactcttccat

SEQ ID NO: 182277 - DNA, 25 bp, Saccharomyces pastorianus
gttgaacaaggaaaccacctacgat

SEQ ID NO: 182278 - DNA, 25 bp, Saccharomyces pastorianus
gctgaaggtaagttgaagggtgtct

SEQ ID NO: 182279 - DNA, 25 bp, Saccharomyces pastorianus
agaaggttgtcaaggctgccgctga

SEQ ID NO: 182280 - DNA, 25 bp, Saccharomyces pastorianus
gtcaagttgaacaaggaaaccacct

SEQ ID NO: 182281 - DNA, 25 bp, Saccharomyces pastorianus
gaacaaggaaaccacctacgatgaa

SEQ ID NO: 182282 - DNA, 25 bp, Saccharomyces pastorianus
cctctgacttcttgggtgactctaa

SEQ ID NO: 182283 - DNA, 25 bp, Saccharomyces pastorianus
ttgactgtcaagttgaacaaggaaa

SEQ ID NO: 182284 - DNA, 25 bp, Saccharomyces pastorianus
cgctgaaggtaagttgaagggtgtc

SEQ ID NO: 182285 - DNA, 25 bp, Saccharomyces pastorianus
gttgtcaaggctgccgctgaaggta

SEQ ID NO: 182286 - DNA, 25 bp, Saccharomyces pastorianus
ctacgatgaaatcaagaaggttgtc

SEQ ID NO: 182287 - DNA, 25 bp, Saccharomyces pastorianus
caagttcttgaattccaggagctcg

SEQ ID NO: 182288 - DNA, 25 bp, Saccharomyces pastorianus
ttcatcttcgtcagaggaggagtac

SEQ ID NO: 182289 - DNA, 25 bp, Saccharomyces pastorianus
ttccttcaagacatcttcatcctca

SEQ ID NO: 182290 - DNA, 25 bp, Saccharomyces pastorianus
agacattttccttcaagacatcttc

SEQ ID NO: 182291 - DNA, 25 bp, Saccharomyces pastorianus
ttcttcaaagtcatccaagttcttg

SEQ ID NO: 182292 - DNA, 25 bp, Saccharomyces pastorianus
tagcatccttttcttcattttgttc

SEQ ID NO: 182293 - DNA, 25 bp, Saccharomyces pastorianus
ggagtacgaagctgcactcaactct

SEQ ID NO: 182294 - DNA, 25 bp, Saccharomyces pastorianus
tcaactctccttcttcaaagtcatc

SEQ ID NO: 182295 - DNA, 25 bp, Saccharomyces pastorianus
atcctcgtccttgttgtcatcattt

SEQ ID NO: 182296 - DNA, 25 bp, Saccharomyces pastorianus
ttcattttgttcatcttcgtcagag

SEQ ID NO: 182297 - DNA, 25 bp, Saccharomyces pastorianus
gtcatcatttgaattagcatccttt

SEQ ID NO: 182298 - DNA, 25 bp, Saccharomyces pastorianus
gatgggtacagaaacttcgttacgt

SEQ ID NO: 182299 - DNA, 25 bp, Saccharomyces pastorianus
aggtgtcgcagaacttattccaggt

SEQ ID NO: 182300 - DNA, 25 bp, Saccharomyces pastorianus
ggtgtgccacctgatttgatcgata

SEQ ID NO: 182301 - DNA, 25 bp, Saccharomyces pastorianus
gaagagctaccgttgaaagattgca

SEQ ID NO: 182302 - DNA, 25 bp, Saccharomyces pastorianus
gacgagatccgtaccattatagaga

SEQ ID NO: 182303 - DNA, 25 bp, Saccharomyces pastorianus
attccaggtgttttgttcattgatg

SEQ ID NO: 182304 - DNA, 25 bp, Saccharomyces pastorianus
atgggccagttgctcaaacctaaga

SEQ ID NO: 182305 - DNA, 25 bp, Saccharomyces pastorianus
aagtagcgcattggaccttttagcc

SEQ ID NO: 182306 - DNA, 25 bp, Saccharomyces pastorianus
ggaccttttagccacgatgggtaca

SEQ ID NO: 182307 - DNA, 25 bp, Saccharomyces pastorianus
gcatgactacagtccgtggcactga

SEQ ID NO: 182308 - DNA, 25 bp, Saccharomyces pastorianus
tggcactgaggatgtgatatcacca

SEQ ID NO: 182309 - DNA, 25 bp, Saccharomyces pastorianus
atgcatttgagtaacactgctaatc

SEQ ID NO: 182310 - DNA, 25 bp, Saccharomyces pastorianus
gagtaacactgctaatccatataga

SEQ ID NO: 182311 - DNA, 25 bp, Saccharomyces pastorianus
agcattcttgtttacatatttgaag

SEQ ID NO: 182312 - DNA, 25 bp, Saccharomyces pastorianus
actgctaatccatatagagacattg

SEQ ID NO: 182313 - DNA, 25 bp, Saccharomyces pastorianus
attgcagcattcttgtttacatatt

SEQ ID NO: 182314 - DNA, 25 bp, Saccharomyces pastorianus
atccatatagagacattgcagcatt

SEQ ID NO: 182315 - DNA, 25 bp, Saccharomyces pastorianus
gagacattgcagcattcttgtttac

SEQ ID NO: 182316 - DNA, 25 bp, Saccharomyces pastorianus
ttgagtaacactgctaatccatata

SEQ ID NO: 182317 - DNA, 25 bp, Saccharomyces pastorianus
gcagcattcttgtttacatatttga

SEQ ID NO: 182318 - DNA, 25 bp, Saccharomyces pastorianus
gacattgcagcattcttgtttacat

SEQ ID NO: 182319 - DNA, 25 bp, Saccharomyces pastorianus
gtaacactgctaatccatatagaga

SEQ ID NO: 182320 - DNA, 25 bp, Saccharomyces pastorianus
caagccaaagcaggcaatgcatttt

SEQ ID NO: 182321 - DNA, 25 bp, Saccharomyces pastorianus
ggaacctaacactattgaacaagat

SEQ ID NO: 182322 - DNA, 25 bp, Saccharomyces pastorianus
taacgatggcgatgactctttgata

SEQ ID NO: 182323 - DNA, 25 bp, Saccharomyces pastorianus
gatttgccatcttcacccatcaagg

SEQ ID NO: 182324 - DNA, 25 bp, Saccharomyces pastorianus
attgctactgattccactttatccg

SEQ ID NO: 182325 - DNA, 25 bp, Saccharomyces pastorianus
gataacaattcaaggcaacaccaat

SEQ ID NO: 182326 - DNA, 25 bp, Saccharomyces pastorianus
gagaaaatggtctctgacgatttga

SEQ ID NO: 182327 - DNA, 25 bp, Saccharomyces pastorianus
ttatccgcatatgctctcagagcta

SEQ ID NO: 182328 - DNA, 25 bp, Saccharomyces pastorianus
ctcagagctaagtctggtgctccaa

SEQ ID NO: 182329 - DNA, 25 bp, Saccharomyces pastorianus
cccatcaaggcacccaacgttgaaa

SEQ ID NO: 182330 - DNA, 25 bp, Saccharomyces pastorianus
ggtgctccaagagacggcgtagtac

SEQ ID NO: 182331 - DNA, 25 bp, Saccharomyces pastorianus
ggatccctgggttttattcgaatat

SEQ ID NO: 182332 - DNA, 25 bp, Saccharomyces pastorianus
tagaggatccctgggttttattcga

SEQ ID NO: 182333 - DNA, 25 bp, Saccharomyces pastorianus
tcgttgggtgagcactgttttatac

SEQ ID NO: 182334 - DNA, 25 bp, Saccharomyces pastorianus
gatccctgggttttattcgaatatt

SEQ ID NO: 182335 - DNA, 25 bp, Saccharomyces pastorianus
cgaatattcgttgggtgagcactgt

SEQ ID NO: 182336 - DNA, 25 bp, Saccharomyces pastorianus
gaggatccctgggttttattcgaat

SEQ ID NO: 182337 - DNA, 25 bp, Saccharomyces pastorianus
cgttgggtgagcactgttttatacc

SEQ ID NO: 182338 - DNA, 25 bp, Saccharomyces pastorianus
gttgggtgagcactgttttatacca

SEQ ID NO: 182339 - DNA, 25 bp, Saccharomyces pastorianus
attcgttgggtgagcactgttttat

SEQ ID NO: 182340 - DNA, 25 bp, Saccharomyces pastorianus
atattcgttgggtgagcactgtttt

SEQ ID NO: 182341 - DNA, 25 bp, Saccharomyces pastorianus
ttcgaatattcgttgggtgagcact

SEQ ID NO: 182342 - DNA, 25 bp, Saccharomyces pastorianus
tagaagataagctggagactgatga

SEQ ID NO: 182343 - DNA, 25 bp, Saccharomyces pastorianus
gcctgattctgtggcagaagataag

SEQ ID NO: 182344 - DNA, 25 bp, Saccharomyces pastorianus
atgttaactcagtgagagagctcga

SEQ ID NO: 182345 - DNA, 25 bp, Saccharomyces pastorianus
aatagagctcgagacttcagaggac

SEQ ID NO: 182346 - DNA, 25 bp, Saccharomyces pastorianus
caatggtgctcgagacttcggtgga

SEQ ID NO: 182347 - DNA, 25 bp, Saccharomyces pastorianus
attcagtggcggaggatgagcctga

SEQ ID NO: 182348 - DNA, 25 bp, Saccharomyces pastorianus
ggcagaagataagctggagactgat

SEQ ID NO: 182349 - DNA, 25 bp, Saccharomyces pastorianus
gatggagcaatggtgctcgagactt

SEQ ID NO: 182350 - DNA, 25 bp, Saccharomyces pastorianus
acttcggtggaggatgatgttaact

SEQ ID NO: 182351 - DNA, 25 bp, Saccharomyces pastorianus
attctgtggcggaggatgagcctga

SEQ ID NO: 182352 - DNA, 25 bp, Saccharomyces pastorianus
cgagacttcagaggacgaggttgat

SEQ ID NO: 182353 - DNA, 25 bp, Saccharomyces pastorianus
agatatgcaattgaccgcgttccaa

SEQ ID NO: 182354 - DNA, 25 bp, Saccharomyces pastorianus
ggtgcggagatcatcctggagtatt

SEQ ID NO: 182355 - DNA, 25 bp, Saccharomyces pastorianus
aggaagatgccaagccaggctctga

SEQ ID NO: 182356 - DNA, 25 bp, Saccharomyces pastorianus
atcctctttttgaagccgattgccc

SEQ ID NO: 182357 - DNA, 25 bp, Saccharomyces pastorianus
ttcacccattcgaggtattacctgc

SEQ ID NO: 182358 - DNA, 25 bp, Saccharomyces pastorianus
ggaagtcagctttaatcctcttttt

SEQ ID NO: 182359 - DNA, 25 bp, Saccharomyces pastorianus
aatacgttcaaggtgcggagatcat

SEQ ID NO: 182360 - DNA, 25 bp, Saccharomyces pastorianus
gccaagccaggctctgatgtggaga

SEQ ID NO: 182361 - DNA, 25 bp, Saccharomyces pastorianus
gaccgcgttccaacagaaatacgtt

SEQ ID NO: 182362 - DNA, 25 bp, Saccharomyces pastorianus
gaggtattacctgcctaagaaatca

SEQ ID NO: 182363 - DNA, 25 bp, Saccharomyces pastorianus
ggagtatttagaattcacccattcg

SEQ ID NO: 182364 - DNA, 25 bp, Saccharomyces pastorianus
atggcaggttttaaagacgacacta

SEQ ID NO: 182365 - DNA, 25 bp, Saccharomyces pastorianus
aggaaatagcccaagctgccaaatt

SEQ ID NO: 182366 - DNA, 25 bp, Saccharomyces pastorianus
tcaacagcgcgacagaaccttcaaa

SEQ ID NO: 182367 - DNA, 25 bp, Saccharomyces pastorianus
gaatgacagactaaggaccccgagt

SEQ ID NO: 182368 - DNA, 25 bp, Saccharomyces pastorianus
ctgttcaagaactgtatggcgattt

SEQ ID NO: 182369 - DNA, 25 bp, Saccharomyces pastorianus
agcggtaagccggacgatttgaaag

SEQ ID NO: 182370 - DNA, 25 bp, Saccharomyces pastorianus
gaaatgcttacttctaccgatgaac

SEQ ID NO: 182371 - DNA, 25 bp, Saccharomyces pastorianus
tctaccgatgaacccgacctagaaa

SEQ ID NO: 182372 - DNA, 25 bp, Saccharomyces pastorianus
aaggaccccgagtgagctacaagaa

SEQ ID NO: 182373 - DNA, 25 bp, Saccharomyces pastorianus
ggcgatttaaaatctgcgcagccaa

SEQ ID NO: 182374 - DNA, 25 bp, Saccharomyces pastorianus
gaactggtgctccaactgttagaga

SEQ ID NO: 182375 - DNA, 25 bp, Saccharomyces pastorianus
acgacatctgatttactttctgtag

SEQ ID NO: 182376 - DNA, 25 bp, Saccharomyces pastorianus
actttctgtagtacagccccagttt

SEQ ID NO: 182377 - DNA, 25 bp, Saccharomyces pastorianus
gccccagtttctacggatattcata

SEQ ID NO: 182378 - DNA, 25 bp, Saccharomyces pastorianus
attaacttccctgtactggttgcta

SEQ ID NO: 182379 - DNA, 25 bp, Saccharomyces pastorianus
gtatttattgctctaacccttttcg

SEQ ID NO: 182380 - DNA, 25 bp, Saccharomyces pastorianus
tccttaagattgacgctagcagagc

SEQ ID NO: 182381 - DNA, 25 bp, Saccharomyces pastorianus
ctgtggctatgctgtatgaaacgac

SEQ ID NO: 182382 - DNA, 25 bp, Saccharomyces pastorianus
attggcgctcctattcagattattg

SEQ ID NO: 182383 - DNA, 25 bp, Saccharomyces pastorianus
aggatccagcggtttttcgaaaatg

SEQ ID NO: 182384 - DNA, 25 bp, Saccharomyces pastorianus
gaaacatcttctaaatatcctcctt

SEQ ID NO: 182385 - DNA, 25 bp, Saccharomyces pastorianus
ggagggttggttactatggctatta

SEQ ID NO: 182386 - DNA, 25 bp, Saccharomyces pastorianus
taccatgaatgcatgtgtcgctgtc

SEQ ID NO: 182387 - DNA, 25 bp, Saccharomyces pastorianus
actaccatgaatgcatgtgtcgctg

SEQ ID NO: 182388 - DNA, 25 bp, Saccharomyces pastorianus
ctggagttggtagtcgcattggtac

SEQ ID NO: 182389 - DNA, 25 bp, Saccharomyces pastorianus
agtcgcattggtactggcattagca

SEQ ID NO: 182390 - DNA, 25 bp, Saccharomyces pastorianus
ttagcactaccatgaatgcatgtgt

SEQ ID NO: 182391 - DNA, 25 bp, Saccharomyces pastorianus
gaatgcatgtgtcgctgtcctcatc

SEQ ID NO: 182392 - DNA, 25 bp, Saccharomyces pastorianus
actgctgcaatactttctgtacctg

SEQ ID NO: 182393 - DNA, 25 bp, Saccharomyces pastorianus
atgaatgcatgtgtcgctgtcctca

SEQ ID NO: 182394 - DNA, 25 bp, Saccharomyces pastorianus
agcactaccatgaatgcatgtgtcg

SEQ ID NO: 182395 - DNA, 25 bp, Saccharomyces pastorianus
gcactaccatgaatgcatgtgtcgc

SEQ ID NO: 182396 - DNA, 25 bp, Saccharomyces pastorianus
ggtagtcgcattggtactggcatta

SEQ ID NO: 182397 - DNA, 25 bp, Saccharomyces pastorianus
gttccaatgttctaatgacacttac

SEQ ID NO: 182398 - DNA, 25 bp, Saccharomyces pastorianus
tttcagcaaagatgagttggtccgt

SEQ ID NO: 182399 - DNA, 25 bp, Saccharomyces pastorianus
atccgttggttctaacttgttcaat

SEQ ID NO: 182400 - DNA, 25 bp, Saccharomyces pastorianus
ccgttactcttacggccaagatttg

SEQ ID NO: 182401 - DNA, 25 bp, Saccharomyces pastorianus
ggccaagatttggagacgttctatc

SEQ ID NO: 182402 - DNA, 25 bp, Saccharomyces pastorianus
acgccgttatcccaattgaaacctg

SEQ ID NO: 182403 - DNA, 25 bp, Saccharomyces pastorianus
ggtgtgcatacgaaattaacgtcag

SEQ ID NO: 182404 - DNA, 25 bp, Saccharomyces pastorianus
agatacgccattaacgacgccgtta

SEQ ID NO: 182405 - DNA, 25 bp, Saccharomyces pastorianus
tgacacttacgtcagatacgccatt

SEQ ID NO: 182406 - DNA, 25 bp, Saccharomyces pastorianus
cgtcagcaacgtcactgaattgacc

SEQ ID NO: 182407 - DNA, 25 bp, Saccharomyces pastorianus
gacgttctatcaagaaggacctggt

SEQ ID NO: 182408 - DNA, 25 bp, Saccharomyces pastorianus
ctttgggacctctgcggtatggaaa

SEQ ID NO: 182409 - DNA, 25 bp, Saccharomyces pastorianus
gtcaaatttcaatgcctgtcgcttt

SEQ ID NO: 182410 - DNA, 25 bp, Saccharomyces pastorianus
aatatgtcccgaattacgcgtcagt

SEQ ID NO: 182411 - DNA, 25 bp, Saccharomyces pastorianus
gttgctaccacctgcttaggaatta

SEQ ID NO: 182412 - DNA, 25 bp, Saccharomyces pastorianus
tgatgatcccgtcattccgtataag

SEQ ID NO: 182413 - DNA, 25 bp, Saccharomyces pastorianus
ttaacagcacctctgttgttgctac

SEQ ID NO: 182414 - DNA, 25 bp, Saccharomyces pastorianus
attgaggaacaccagcattagcata

SEQ ID NO: 182415 - DNA, 25 bp, Saccharomyces pastorianus
aaaaatgacgcagcccgattaggtg

SEQ ID NO: 182416 - DNA, 25 bp, Saccharomyces pastorianus
taggagatcattaccagctaccgcc

SEQ ID NO: 182417 - DNA, 25 bp, Saccharomyces pastorianus
ataaggtccatcctgacacgcaaaa

SEQ ID NO: 182418 - DNA, 25 bp, Saccharomyces pastorianus
gggaaacgcgtgcttttgacatcat

SEQ ID NO: 182419 - DNA, 25 bp, Saccharomyces pastorianus
gctagttccaacttgagcactgtct

SEQ ID NO: 182420 - DNA, 25 bp, Saccharomyces pastorianus
gtatcttcgatttcgggatctggtt

SEQ ID NO: 182421 - DNA, 25 bp, Saccharomyces pastorianus
aaatggtgcttcttccgtgttggca

SEQ ID NO: 182422 - DNA, 25 bp, Saccharomyces pastorianus
ctagaaatgtccacctacgctggta

SEQ ID NO: 182423 - DNA, 25 bp, Saccharomyces pastorianus
acaccgaggtacttgctagttccaa

SEQ ID NO: 182424 - DNA, 25 bp, Saccharomyces pastorianus
gcaacggcaatggtgtatcttcgat

SEQ ID NO: 182425 - DNA, 25 bp, Saccharomyces pastorianus
gaaggacatactaccgctaccaatg

SEQ ID NO: 182426 - DNA, 25 bp, Saccharomyces pastorianus
gtactactacagttagcgccagtgt

SEQ ID NO: 182427 - DNA, 25 bp, Saccharomyces pastorianus
tgccattcctgaagcaaccgaaacg

SEQ ID NO: 182428 - DNA, 25 bp, Saccharomyces pastorianus
tcgtagcacttccacaagcggcatg

SEQ ID NO: 182429 - DNA, 25 bp, Saccharomyces pastorianus
gtattgccaacggactactagccaa

SEQ ID NO: 182430 - DNA, 25 bp, Saccharomyces pastorianus
cagttatatcctttacactaccggt

SEQ ID NO: 182431 - DNA, 25 bp, Saccharomyces pastorianus
aagatgttgaacaggctttccgccg

SEQ ID NO: 182432 - DNA, 25 bp, Saccharomyces pastorianus
acactaccggtaatcacacgttatt

SEQ ID NO: 182433 - DNA, 25 bp, Saccharomyces pastorianus
tggtatgtacattctatcgacgata

SEQ ID NO: 182434 - DNA, 25 bp, Saccharomyces pastorianus
cgccgtactttcacatctattatat

SEQ ID NO: 182435 - DNA, 25 bp, Saccharomyces pastorianus
tacaacgcaatgaccgtggttcttg

SEQ ID NO: 182436 - DNA, 25 bp, Saccharomyces pastorianus
gacagggaacgctttcgtttttgat

SEQ ID NO: 182437 - DNA, 25 bp, Saccharomyces pastorianus
gagacagcattatccttgttgaagg

SEQ ID NO: 182438 - DNA, 25 bp, Saccharomyces pastorianus
atcgacgatattgcatagcttagcc

SEQ ID NO: 182439 - DNA, 25 bp, Saccharomyces pastorianus
attacgatccagtgttgtttctaaa

SEQ ID NO: 182440 - DNA, 25 bp, Saccharomyces pastorianus
ggactttgattttaccactactgaa

SEQ ID NO: 182441 - DNA, 25 bp, Saccharomyces pastorianus
ctcacagtctacttgggcttaaacc

SEQ ID NO: 182442 - DNA, 25 bp, Saccharomyces pastorianus
ggtgtcatttatggtttaccgacat

SEQ ID NO: 182443 - DNA, 25 bp, Saccharomyces pastorianus
agtcgcctcgtttcattgccggtta

SEQ ID NO: 182444 - DNA, 25 bp, Saccharomyces pastorianus
gttcagtcacttactgttcagtcgc

SEQ ID NO: 182445 - DNA, 25 bp, Saccharomyces pastorianus
gtttcattgccggttacacggcaaa

SEQ ID NO: 182446 - DNA, 25 bp, Saccharomyces pastorianus
aagcctactgttcagtcacttactg

SEQ ID NO: 182447 - DNA, 25 bp, Saccharomyces pastorianus
ttactgttcagtcgcctcgtttcat

SEQ ID NO: 182448 - DNA, 25 bp, Saccharomyces pastorianus
atggcctactgtttagttgcctcaa

SEQ ID NO: 182449 - DNA, 25 bp, Saccharomyces pastorianus
acggcaaatttgttatttggtgtca

SEQ ID NO: 182450 - DNA, 25 bp, Saccharomyces pastorianus
ccacttgggcatggcctactgttta

SEQ ID NO: 182451 - DNA, 25 bp, Saccharomyces pastorianus
tgtttagttgcctcaagcctactgt

SEQ ID NO: 182452 - DNA, 25 bp, Saccharomyces pastorianus
aaagaaataaagattgcagcacctg

SEQ ID NO: 182453 - DNA, 25 bp, Saccharomyces pastorianus
ataaagattgcagcacctgagtttc

SEQ ID NO: 182454 - DNA, 25 bp, Saccharomyces pastorianus
aagaaataaagattgcagcacctga

SEQ ID NO: 182455 - DNA, 25 bp, Saccharomyces pastorianus
aaagattgcagcacctgagtttcgc

SEQ ID NO: 182456 - DNA, 25 bp, Saccharomyces pastorianus
agaaataaagattgcagcacctgag

SEQ ID NO: 182457 - DNA, 25 bp, Saccharomyces pastorianus
gaaataaagattgcagcacctgagt

SEQ ID NO: 182458 - DNA, 25 bp, Saccharomyces pastorianus
aaaagaaataaagattgcagcacct

SEQ ID NO: 182459 - DNA, 25 bp, Saccharomyces pastorianus
aaaaagaaataaagattgcagcacc

SEQ ID NO: 182460 - DNA, 25 bp, Saccharomyces pastorianus
aaaaaagaaataaagattgcagcac

SEQ ID NO: 182461 - DNA, 25 bp, Saccharomyces pastorianus
aataaagattgcagcacctgagttt

SEQ ID NO: 182462 - DNA, 25 bp, Saccharomyces pastorianus
aaataaagattgcagcacctgagtt

SEQ ID NO: 182463 - DNA, 25 bp, Saccharomyces pastorianus
tctgtcgggaggaagggaattctta

SEQ ID NO: 182464 - DNA, 25 bp, Saccharomyces pastorianus
gatgatcgtaaaggtgaaactaaga

SEQ ID NO: 182465 - DNA, 25 bp, Saccharomyces pastorianus
atctgtcgggaggaagggaattctt

SEQ ID NO: 182466 - DNA, 25 bp, Saccharomyces pastorianus
ataattgcggatggcgatctgtcgg

SEQ ID NO: 182467 - DNA, 25 bp, Saccharomyces pastorianus
agataattgcggatggcgatctgtc

SEQ ID NO: 182468 - DNA, 25 bp, Saccharomyces pastorianus
ctcgatgatcgtaaaggtgaaacta

SEQ ID NO: 182469 - DNA, 25 bp, Saccharomyces pastorianus
actaagataattgcggatggcgatc

SEQ ID NO: 182470 - DNA, 25 bp, Saccharomyces pastorianus
attgcggatggcgatctgtcgggag

SEQ ID NO: 182471 - DNA, 25 bp, Saccharomyces pastorianus
gataattgcggatggcgatctgtcg

SEQ ID NO: 182472 - DNA, 25 bp, Saccharomyces pastorianus
aaactaagataattgcggatggcga

SEQ ID NO: 182473 - DNA, 25 bp, Saccharomyces pastorianus
catgtattactcgatgatcgtaaag

SEQ ID NO: 182474 - DNA, 25 bp, Saccharomyces pastorianus
gtctgctgacacagtggaactgata

SEQ ID NO: 182475 - DNA, 25 bp, Saccharomyces pastorianus
gattaaggaaggctgtataaccgaa

SEQ ID NO: 182476 - DNA, 25 bp, Saccharomyces pastorianus
ctgtctgctgacacagtggaactga

SEQ ID NO: 182477 - DNA, 25 bp, Saccharomyces pastorianus
tgtctgctgacacagtggaactgat

SEQ ID NO: 182478 - DNA, 25 bp, Saccharomyces pastorianus
cctgtctgctgacacagtggaactg

SEQ ID NO: 182479 - DNA, 25 bp, Saccharomyces pastorianus
tgttggatgctgtggctccaggaca

SEQ ID NO: 182480 - DNA, 25 bp, Saccharomyces pastorianus
ataaccgaacaggtacgcgagttct

SEQ ID NO: 182481 - DNA, 25 bp, Saccharomyces pastorianus
acctgtctgctgacacagtggaact

SEQ ID NO: 182482 - DNA, 25 bp, Saccharomyces pastorianus
agacctgtctgctgacacagtggaa

SEQ ID NO: 182483 - DNA, 25 bp, Saccharomyces pastorianus
gacctgtctgctgacacagtggaac

SEQ ID NO: 182484 - DNA, 25 bp, Saccharomyces pastorianus
aacaggtacgcgagttctatggact

SEQ ID NO: 182485 - DNA, 25 bp, Saccharomyces pastorianus
gactggtaactacgttaaacatcca

SEQ ID NO: 182486 - DNA, 25 bp, Saccharomyces pastorianus
tatctctttgactggtaactacgtt

SEQ ID NO: 182487 - DNA, 25 bp, Saccharomyces pastorianus
agtgcgttcttctaactttatctcc

SEQ ID NO: 182488 - DNA, 25 bp, Saccharomyces pastorianus
cgacgaagagttgagttctggtgac

SEQ ID NO: 182489 - DNA, 25 bp, Saccharomyces pastorianus
agacaactcttctgattccgatgac

SEQ ID NO: 182490 - DNA, 25 bp, Saccharomyces pastorianus
aaacatccattcgatacacctttag

SEQ ID NO: 182491 - DNA, 25 bp, Saccharomyces pastorianus
gatacacctttagaagacaactctt

SEQ ID NO: 182492 - DNA, 25 bp, Saccharomyces pastorianus
ttctggtgacgatgaacttgatgat

SEQ ID NO: 182493 - DNA, 25 bp, Saccharomyces pastorianus
caacgagttcgaagagtgcgttctt

SEQ ID NO: 182494 - DNA, 25 bp, Saccharomyces pastorianus
ctaactttatctccaaaaggtcaat

SEQ ID NO: 182495 - DNA, 25 bp, Saccharomyces pastorianus
ttctgattccgatgacgacgaagag

SEQ ID NO: 182496 - DNA, 25 bp, Saccharomyces pastorianus
gcccgaagttgcacatttgctttta

SEQ ID NO: 182497 - DNA, 25 bp, Saccharomyces pastorianus
gcgcgctacgacactatcaagattg

SEQ ID NO: 182498 - DNA, 25 bp, Saccharomyces pastorianus
ggctaccgcgttgttaattcttggc

SEQ ID NO: 182499 - DNA, 25 bp, Saccharomyces pastorianus
aagtcttcacctctgcatctttaaa

SEQ ID NO: 182500 - DNA, 25 bp, Saccharomyces pastorianus
ataccgctattacatcatcaccaga

SEQ ID NO: 182501 - DNA, 25 bp, Saccharomyces pastorianus
caaggcttacttattatggtccaga

SEQ ID NO: 182502 - DNA, 25 bp, Saccharomyces pastorianus
gatctcggtgagtacagcaggctaa

SEQ ID NO: 182503 - DNA, 25 bp, Saccharomyces pastorianus
gattttcttgatatggctaccgcgt

SEQ ID NO: 182504 - DNA, 25 bp, Saccharomyces pastorianus
atttggtgtctcatttgccatggat

SEQ ID NO: 182505 - DNA, 25 bp, Saccharomyces pastorianus
atgatattgtgcacatcccgttcga

SEQ ID NO: 182506 - DNA, 25 bp, Saccharomyces pastorianus
tggtgcaccagcgtcattgatatat

SEQ ID NO: 182507 - DNA, 25 bp, Saccharomyces pastorianus
aacgtccaatgggtatactgtcaac

SEQ ID NO: 182508 - DNA, 25 bp, Saccharomyces pastorianus
aatgggtatactgtcaaccacaaca

SEQ ID NO: 182509 - DNA, 25 bp, Saccharomyces pastorianus
tttcacaacgtccaatgggtatact

SEQ ID NO: 182510 - DNA, 25 bp, Saccharomyces pastorianus
tcacaacgtccaatgggtatactgt

SEQ ID NO: 182511 - DNA, 25 bp, Saccharomyces pastorianus
tgggtatactgtcaaccacaacatt

SEQ ID NO: 182512 - DNA, 25 bp, Saccharomyces pastorianus
tccaatgggtatactgtcaaccaca

SEQ ID NO: 182513 - DNA, 25 bp, Saccharomyces pastorianus
gatttcacaacgtccaatgggtata

SEQ ID NO: 182514 - DNA, 25 bp, Saccharomyces pastorianus
cgtccaatgggtatactgtcaacca

SEQ ID NO: 182515 - DNA, 25 bp, Saccharomyces pastorianus
ggatttcacaacgtccaatgggtat

SEQ ID NO: 182516 - DNA, 25 bp, Saccharomyces pastorianus
ttgtataatggatttcacaacgtcc

SEQ ID NO: 182517 - DNA, 25 bp, Saccharomyces pastorianus
aaatgcaccaaataagcataatttc

SEQ ID NO: 182518 - DNA, 25 bp, Saccharomyces pastorianus
gttactatagtatcttgttgcacga

SEQ ID NO: 182519 - DNA, 25 bp, Saccharomyces pastorianus
agccagcgaattgccatctagtttt

SEQ ID NO: 182520 - DNA, 25 bp, Saccharomyces pastorianus
acctaggcacaatatcatgttacta

SEQ ID NO: 182521 - DNA, 25 bp, Saccharomyces pastorianus
tagcacaatcacgtctgcattctaa

SEQ ID NO: 182522 - DNA, 25 bp, Saccharomyces pastorianus
aaacatcatcaatgcctgaagctga

SEQ ID NO: 182523 - DNA, 25 bp, Saccharomyces pastorianus
ctgagattgctgatgtggacgcaca

SEQ ID NO: 182524 - DNA, 25 bp, Saccharomyces pastorianus
gcacttggaagttacctaggcacaa

SEQ ID NO: 182525 - DNA, 25 bp, Saccharomyces pastorianus
catctatgaagggacatccggtcat

SEQ ID NO: 182526 - DNA, 25 bp, Saccharomyces pastorianus
gaaaccgcaaacattgaggccttta

SEQ ID NO: 182527 - DNA, 25 bp, Saccharomyces pastorianus
atttgctccactttcaaaagaattc

SEQ ID NO: 182528 - DNA, 25 bp, Saccharomyces pastorianus
gtatcttgttgcacgaactccataa

SEQ ID NO: 182529 - DNA, 25 bp, Saccharomyces pastorianus
aatagcagcttcaacaaccgtacca

SEQ ID NO: 182530 - DNA, 25 bp, Saccharomyces pastorianus
gaattcagcgctcacggagattcaa

SEQ ID NO: 182531 - DNA, 25 bp, Saccharomyces pastorianus
taacttagcgttgtccacattgggc

SEQ ID NO: 182532 - DNA, 25 bp, Saccharomyces pastorianus
cacattgggctttttctctgcttct

SEQ ID NO: 182533 - DNA, 25 bp, Saccharomyces pastorianus
gttcctctgatattcttggcttatt

SEQ ID NO: 182534 - DNA, 25 bp, Saccharomyces pastorianus
ttatctttgctagtggttcctctga

SEQ ID NO: 182535 - DNA, 25 bp, Saccharomyces pastorianus
gatatgcattgtcgtctttctatta

SEQ ID NO: 182536 - DNA, 25 bp, Saccharomyces pastorianus
atggattttagtaccgggcgctgct

SEQ ID NO: 182537 - DNA, 25 bp, Saccharomyces pastorianus
tattttatcctcacgttacctggtg

SEQ ID NO: 182538 - DNA, 25 bp, Saccharomyces pastorianus
gaatgctgctgaacgacccatatcc

SEQ ID NO: 182539 - DNA, 25 bp, Saccharomyces pastorianus
tatccaggctcagcggccgaaagat

SEQ ID NO: 182540 - DNA, 25 bp, Saccharomyces pastorianus
tattatcctcagcattgccatcttt

SEQ ID NO: 182541 - DNA, 25 bp, Saccharomyces pastorianus
tttcagtggcagtagcattagtgct

SEQ ID NO: 182542 - DNA, 25 bp, Saccharomyces pastorianus
agtcccactagtcctgacgttgatg

SEQ ID NO: 182543 - DNA, 25 bp, Saccharomyces pastorianus
tgctggcagtggtagtcccactagt

SEQ ID NO: 182544 - DNA, 25 bp, Saccharomyces pastorianus
ttgatgctggcagtggtagtcccac

SEQ ID NO: 182545 - DNA, 25 bp, Saccharomyces pastorianus
agcatttgtgctggagttggtactt

SEQ ID NO: 182546 - DNA, 25 bp, Saccharomyces pastorianus
attatcctcagcattgccatcttta

SEQ ID NO: 182547 - DNA, 25 bp, Saccharomyces pastorianus
gcatttgtgctggagttggtacttt

SEQ ID NO: 182548 - DNA, 25 bp, Saccharomyces pastorianus
actttcagtggcagtagcattagtg

SEQ ID NO: 182549 - DNA, 25 bp, Saccharomyces pastorianus
ggcagtggtagtcccactagtcctg

SEQ ID NO: 182550 - DNA, 25 bp, Saccharomyces pastorianus
tctattatcctcagcattgccatct

SEQ ID NO: 182551 - DNA, 25 bp, Saccharomyces pastorianus
ggtccgacattagagccgttcgata

SEQ ID NO: 182552 - DNA, 25 bp, Saccharomyces pastorianus
ttggcaaaccgcattcagttgtgga

SEQ ID NO: 182553 - DNA, 25 bp, Saccharomyces pastorianus
ggtacctctcttgttgttgatggaa

SEQ ID NO: 182554 - DNA, 25 bp, Saccharomyces pastorianus
agatgttctaattttcgcagccgtc

SEQ ID NO: 182555 - DNA, 25 bp, Saccharomyces pastorianus
tacgctagcgacatttcctacgtta

SEQ ID NO: 182556 - DNA, 25 bp, Saccharomyces pastorianus
ataagatggcgcagggtccgacatt

SEQ ID NO: 182557 - DNA, 25 bp, Saccharomyces pastorianus
gcagccgtcccaagtatcgaagaaa

SEQ ID NO: 182558 - DNA, 25 bp, Saccharomyces pastorianus
aaggacttcacgttgatgttttctg

SEQ ID NO: 182559 - DNA, 25 bp, Saccharomyces pastorianus
gtatagtctgcgaattccccaaatc

SEQ ID NO: 182560 - DNA, 25 bp, Saccharomyces pastorianus
agtgaatatcactcctctagctctt

SEQ ID NO: 182561 - DNA, 25 bp, Saccharomyces pastorianus
gaggcactagccgtagtattggcaa

SEQ ID NO: 182562 - DNA, 25 bp, Saccharomyces pastorianus
tggtggtgacactttaggccttgac

SEQ ID NO: 182563 - DNA, 25 bp, Saccharomyces pastorianus
aagtacgtacttccatcaaatcaga

SEQ ID NO: 182564 - DNA, 25 bp, Saccharomyces pastorianus
aaaatagtatccctgcagctcttgg

SEQ ID NO: 182565 - DNA, 25 bp, Saccharomyces pastorianus
gaagatgccgtacctggtaccgatg

SEQ ID NO: 182566 - DNA, 25 bp, Saccharomyces pastorianus
tatggctgctcaatccaaggatgct

SEQ ID NO: 182567 - DNA, 25 bp, Saccharomyces pastorianus
tcatgtcatttttgcccggtttgaa

SEQ ID NO: 182568 - DNA, 25 bp, Saccharomyces pastorianus
aattgctcttggtgttactttaggg

SEQ ID NO: 182569 - DNA, 25 bp, Saccharomyces pastorianus
ttattcccaccgaaccatttggatg

SEQ ID NO: 182570 - DNA, 25 bp, Saccharomyces pastorianus
ttggaacctccactaatcgatttcg

SEQ ID NO: 182571 - DNA, 25 bp, Saccharomyces pastorianus
ctaataccgttgacccttatgttgt

SEQ ID NO: 182572 - DNA, 25 bp, Saccharomyces pastorianus
attgggcctatgttattcccaccga

SEQ ID NO: 182573 - DNA, 25 bp, Saccharomyces pastorianus
atctactaactagtatttatgttac

SEQ ID NO: 182574 - DNA, 25 bp, Saccharomyces pastorianus
ctactaactagtatttatgttacta

SEQ ID NO: 182575 - DNA, 25 bp, Saccharomyces pastorianus
tctactaactagtatttatgttact

SEQ ID NO: 182576 - DNA, 25 bp, Saccharomyces pastorianus
tgttactagtatattatcatatacg

SEQ ID NO: 182577 - DNA, 25 bp, Saccharomyces pastorianus
catctactaactagtatttatgtta

SEQ ID NO: 182578 - DNA, 25 bp, Saccharomyces pastorianus
tatgttactagtatattatcatata

SEQ ID NO: 182579 - DNA, 25 bp, Saccharomyces pastorianus
gaataaaaatcaactatcatctact

SEQ ID NO: 182580 - DNA, 25 bp, Saccharomyces pastorianus
ggaataaaaatcaactatcatctac

SEQ ID NO: 182581 - DNA, 25 bp, Saccharomyces pastorianus
aataaaaatcaactatcatctacta

SEQ ID NO: 182582 - DNA, 25 bp, Saccharomyces pastorianus
tcatctactaactagtatttatgtt

SEQ ID NO: 182583 - DNA, 25 bp, Saccharomyces pastorianus
gttggaataaaaatcaactatcatc

SEQ ID NO: 182584 - DNA, 25 bp, Saccharomyces pastorianus
ctcccccctggtttgatatcataaa

SEQ ID NO: 182585 - DNA, 25 bp, Saccharomyces pastorianus
gtatatcttatcacaccagtttatc

SEQ ID NO: 182586 - DNA, 25 bp, Saccharomyces pastorianus
gaaatacatacaattacttcccaat

SEQ ID NO: 182587 - DNA, 25 bp, Saccharomyces pastorianus
gtttatccaaagatagatgcagttt

SEQ ID NO: 182588 - DNA, 25 bp, Saccharomyces pastorianus
gatgcagttttgaaattggttactt

SEQ ID NO: 182589 - DNA, 25 bp, Saccharomyces pastorianus
tcccaattacttcccaaatattctc

SEQ ID NO: 182590 - DNA, 25 bp, Saccharomyces pastorianus
ggacatcagcattcaatgtatatct

SEQ ID NO: 182591 - DNA, 25 bp, Saccharomyces pastorianus
tgatatcataaaagcaccttatggc

SEQ ID NO: 182592 - DNA, 25 bp, Saccharomyces pastorianus
atcacaccagtttatccaaagatag

SEQ ID NO: 182593 - DNA, 25 bp, Saccharomyces pastorianus
tacttcccaattacttcccaaatat

SEQ ID NO: 182594 - DNA, 25 bp, Saccharomyces pastorianus
gaatatttctactacatttcgataa

SEQ ID NO: 182595 - DNA, 25 bp, Saccharomyces pastorianus
ggttttgcaagggttatttctctgt

SEQ ID NO: 182596 - DNA, 25 bp, Saccharomyces pastorianus
gtgtaccataaggttttgcaagggt

SEQ ID NO: 182597 - DNA, 25 bp, Saccharomyces pastorianus
gcctgttcgtgtaccataaggtttt

SEQ ID NO: 182598 - DNA, 25 bp, Saccharomyces pastorianus
gaaggaagacgatagaaactgccaa

SEQ ID NO: 182599 - DNA, 25 bp, Saccharomyces pastorianus
gaaactgccaagaaacttttagagg

SEQ ID NO: 182600 - DNA, 25 bp, Saccharomyces pastorianus
gggcctgttcgtgtaccataaggtt

SEQ ID NO: 182601 - DNA, 25 bp, Saccharomyces pastorianus
tttgcaagggttatttctctgtaaa

SEQ ID NO: 182602 - DNA, 25 bp, Saccharomyces pastorianus
gttcgtgtaccataaggttttgcaa

SEQ ID NO: 182603 - DNA, 25 bp, Saccharomyces pastorianus
gcaagggttatttctctgtaaatat

SEQ ID NO: 182604 - DNA, 25 bp, Saccharomyces pastorianus
atgctatggccggaaaagaaggaag

SEQ ID NO: 182605 - DNA, 25 bp, Saccharomyces pastorianus
gacgatagaaactgccaagaaactt

SEQ ID NO: 182606 - DNA, 25 bp, Saccharomyces pastorianus
tgaagccacaaccactactgtttct

SEQ ID NO: 182607 - DNA, 25 bp, Saccharomyces pastorianus
gactgtcacctctgaggcccctgaa

SEQ ID NO: 182608 - DNA, 25 bp, Saccharomyces pastorianus
agcaactactacttctccaaaatca

SEQ ID NO: 182609 - DNA, 25 bp, Saccharomyces pastorianus
cttctgaatgtcctgaagaaacttc

SEQ ID NO: 182610 - DNA, 25 bp, Saccharomyces pastorianus
gcaactactacttctccaaaatcat

SEQ ID NO: 182611 - DNA, 25 bp, Saccharomyces pastorianus
aaacttcagcaactactacttctcc

SEQ ID NO: 182612 - DNA, 25 bp, Saccharomyces pastorianus
ttcagcaactactacttctccaaaa

SEQ ID NO: 182613 - DNA, 25 bp, Saccharomyces pastorianus
caactactacttctccaaaatcata

SEQ ID NO: 182614 - DNA, 25 bp, Saccharomyces pastorianus
gaagaaacttcagcaactactactt

SEQ ID NO: 182615 - DNA, 25 bp, Saccharomyces pastorianus
tcagcaactactacttctccaaaat

SEQ ID NO: 182616 - DNA, 25 bp, Saccharomyces pastorianus
gaagccacaaccactactgtttctc

SEQ ID NO: 182617 - DNA, 25 bp, Saccharomyces pastorianus
gctgatttctttagccatcaatgcc

SEQ ID NO: 182618 - DNA, 25 bp, Saccharomyces pastorianus
aatccggtgctgatttctttagcca

SEQ ID NO: 182619 - DNA, 25 bp, Saccharomyces pastorianus
gttttgtatgatagatttcacgaca

SEQ ID NO: 182620 - DNA, 25 bp, Saccharomyces pastorianus
tggatacaccgtcaaccacaacatt

SEQ ID NO: 182621 - DNA, 25 bp, Saccharomyces pastorianus
ggtgctgatttctttagccatcaat

SEQ ID NO: 182622 - DNA, 25 bp, Saccharomyces pastorianus
aatagacacagtttccaaggaggaa

SEQ ID NO: 182623 - DNA, 25 bp, Saccharomyces pastorianus
tttcgtttcttgttaatccggtgct

SEQ ID NO: 182624 - DNA, 25 bp, Saccharomyces pastorianus
atccaatggatacaccgtcaaccac

SEQ ID NO: 182625 - DNA, 25 bp, Saccharomyces pastorianus
gatagatttcacgacatccaatgga

SEQ ID NO: 182626 - DNA, 25 bp, Saccharomyces pastorianus
aatgcaccaaatagacacagtttcc

SEQ ID NO: 182627 - DNA, 25 bp, Saccharomyces pastorianus
cgtttcttgttaatccggtgctgat

SEQ ID NO: 182628 - DNA, 25 bp, Saccharomyces pastorianus
tcggtttctctgtgatgttttctat

SEQ ID NO: 182629 - DNA, 25 bp, Saccharomyces pastorianus
cagccagatgtgtagtgatgtggtt

SEQ ID NO: 182630 - DNA, 25 bp, Saccharomyces pastorianus
atctcaccagccagatgtgtagtga

SEQ ID NO: 182631 - DNA, 25 bp, Saccharomyces pastorianus
gtttcggtttctctgtgatgttttc

SEQ ID NO: 182632 - DNA, 25 bp, Saccharomyces pastorianus
gggctttgaacccagccgtttctct

SEQ ID NO: 182633 - DNA, 25 bp, Saccharomyces pastorianus
ttctctctctttgtgtttggccaga

SEQ ID NO: 182634 - DNA, 25 bp, Saccharomyces pastorianus
tttctctgtgatgttttctatctgg

SEQ ID NO: 182635 - DNA, 25 bp, Saccharomyces pastorianus
ttgtgtttggccagagccatctcac

SEQ ID NO: 182636 - DNA, 25 bp, Saccharomyces pastorianus
tctctttgtgtttggccagagccat

SEQ ID NO: 182637 - DNA, 25 bp, Saccharomyces pastorianus
agagccatctcaccagccagatgtg

SEQ ID NO: 182638 - DNA, 25 bp, Saccharomyces pastorianus
agccgtttctctctctttgtgtttg

SEQ ID NO: 182639 - DNA, 25 bp, Saccharomyces pastorianus
tcattataatctctgctctttgtgc

SEQ ID NO: 182640 - DNA, 25 bp, Saccharomyces pastorianus
cattataatctctgctctttgtgct

SEQ ID NO: 182641 - DNA, 25 bp, Saccharomyces pastorianus
gcctctatcattataatctctgctc

SEQ ID NO: 182642 - DNA, 25 bp, Saccharomyces pastorianus
gagagaactgccgaacgaatgtgga

SEQ ID NO: 182643 - DNA, 25 bp, Saccharomyces pastorianus
gataacgcctctatcattataatct

SEQ ID NO: 182644 - DNA, 25 bp, Saccharomyces pastorianus
gaactgccgaacgaatgtggattca

SEQ ID NO: 182645 - DNA, 25 bp, Saccharomyces pastorianus
gattcactagtgataacgcctctat

SEQ ID NO: 182646 - DNA, 25 bp, Saccharomyces pastorianus
ggtcttcaaccgaaaactggtgtag

SEQ ID NO: 182647 - DNA, 25 bp, Saccharomyces pastorianus
gccgaacgaatgtggattcactagt

SEQ ID NO: 182648 - DNA, 25 bp, Saccharomyces pastorianus
cgaaaactggtgtagaagccgatat

SEQ ID NO: 182649 - DNA, 25 bp, Saccharomyces pastorianus
tcactagtgataacgcctctatcat

SEQ ID NO: 182650 - DNA, 25 bp, Saccharomyces pastorianus
atggctagctgctttgtctattcaa

SEQ ID NO: 182651 - DNA, 25 bp, Saccharomyces pastorianus
aatggctagctgctttgtctattca

SEQ ID NO: 182652 - DNA, 25 bp, Saccharomyces pastorianus
ggctagctgctttgtctattcaaga

SEQ ID NO: 182653 - DNA, 25 bp, Saccharomyces pastorianus
gtctattcaagaagttggtccctct

SEQ ID NO: 182654 - DNA, 25 bp, Saccharomyces pastorianus
gctgggttgactaaaggtgaagatt

SEQ ID NO: 182655 - DNA, 25 bp, Saccharomyces pastorianus
ttgtctattcaagaagttggtccct

SEQ ID NO: 182656 - DNA, 25 bp, Saccharomyces pastorianus
tggctagctgctttgtctattcaag

SEQ ID NO: 182657 - DNA, 25 bp, Saccharomyces pastorianus
ctagctgctttgtctattcaagaag

SEQ ID NO: 182658 - DNA, 25 bp, Saccharomyces pastorianus
gctagctgctttgtctattcaagaa

SEQ ID NO: 182659 - DNA, 25 bp, Saccharomyces pastorianus
tcaatggctagctgctttgtctatt

SEQ ID NO: 182660 - DNA, 25 bp, Saccharomyces pastorianus
aggtgaagatttggaaacctctatt

SEQ ID NO: 182661 - DNA, 25 bp, Saccharomyces pastorianus
ctcaaaacagtagccagtcgcgtac

SEQ ID NO: 182662 - DNA, 25 bp, Saccharomyces pastorianus
gataatggcacaaccgacagcgtcc

SEQ ID NO: 182663 - DNA, 25 bp, Saccharomyces pastorianus
gatcttctcagccttgatctggata

SEQ ID NO: 182664 - DNA, 25 bp, Saccharomyces pastorianus
tgtttcttcagcatcggcttcacta

SEQ ID NO: 182665 - DNA, 25 bp, Saccharomyces pastorianus
ggcttcactacaacctgtcagaact

SEQ ID NO: 182666 - DNA, 25 bp, Saccharomyces pastorianus
ggttctctgatatcggatcttctca

SEQ ID NO: 182667 - DNA, 25 bp, Saccharomyces pastorianus
ataaatctgtatcagcacctgctcc

SEQ ID NO: 182668 - DNA, 25 bp, Saccharomyces pastorianus
atgattagcgaccatcggccagttt

SEQ ID NO: 182669 - DNA, 25 bp, Saccharomyces pastorianus
aactgcatcgttgtcatctgtgact

SEQ ID NO: 182670 - DNA, 25 bp, Saccharomyces pastorianus
aagctcttctgaaagttctctactt

SEQ ID NO: 182671 - DNA, 25 bp, Saccharomyces pastorianus
catcggccagtttacgcagcatata

SEQ ID NO: 182672 - DNA, 25 bp, Saccharomyces pastorianus
gctattaaatgggacggctcttctg

SEQ ID NO: 182673 - DNA, 25 bp, Saccharomyces pastorianus
gacggctcttctggcggtgtcatca

SEQ ID NO: 182674 - DNA, 25 bp, Saccharomyces pastorianus
cggtgtcatcagaatggttgttttg

SEQ ID NO: 182675 - DNA, 25 bp, Saccharomyces pastorianus
ggacggctcttctggcggtgtcatc

SEQ ID NO: 182676 - DNA, 25 bp, Saccharomyces pastorianus
ctcttctggcggtgtcatcagaatg

SEQ ID NO: 182677 - DNA, 25 bp, Saccharomyces pastorianus
ggcggtgtcatcagaatggttgttt

SEQ ID NO: 182678 - DNA, 25 bp, Saccharomyces pastorianus
ctggcggtgtcatcagaatggttgt

SEQ ID NO: 182679 - DNA, 25 bp, Saccharomyces pastorianus
cttctggcggtgtcatcagaatggt

SEQ ID NO: 182680 - DNA, 25 bp, Saccharomyces pastorianus
gctcttctggcggtgtcatcagaat

SEQ ID NO: 182681 - DNA, 25 bp, Saccharomyces pastorianus
ctattaaatgggacggctcttctgg

SEQ ID NO: 182682 - DNA, 25 bp, Saccharomyces pastorianus
tattaaatgggacggctcttctggc

SEQ ID NO: 182683 - DNA, 25 bp, Saccharomyces pastorianus
gaaagcgggttgagaatcgtcaaaa

SEQ ID NO: 182684 - DNA, 25 bp, Saccharomyces pastorianus
gatcgtttctgctccattagatgtc

SEQ ID NO: 182685 - DNA, 25 bp, Saccharomyces pastorianus
ggtccaaaactggttttctcatttg

SEQ ID NO: 182686 - DNA, 25 bp, Saccharomyces pastorianus
tgcttgctcctctctgatcgtttct

SEQ ID NO: 182687 - DNA, 25 bp, Saccharomyces pastorianus
ggttttctcatttgcgttagctcaa

SEQ ID NO: 182688 - DNA, 25 bp, Saccharomyces pastorianus
tcaagggcttaacacctaaattact

SEQ ID NO: 182689 - DNA, 25 bp, Saccharomyces pastorianus
tgtaactgcgtttttcaagggctta

SEQ ID NO: 182690 - DNA, 25 bp, Saccharomyces pastorianus
atttgcgttagctcaatctttgata

SEQ ID NO: 182691 - DNA, 25 bp, Saccharomyces pastorianus
attttgataatcctgaaagcgggtt

SEQ ID NO: 182692 - DNA, 25 bp, Saccharomyces pastorianus
atgcattcgccaaggagtatatctt

SEQ ID NO: 182693 - DNA, 25 bp, Saccharomyces pastorianus
attattctcaagctacttggtccca

SEQ ID NO: 182694 - DNA, 25 bp, Saccharomyces pastorianus
atgatcatgttttcgctaggaaccg

SEQ ID NO: 182695 - DNA, 25 bp, Saccharomyces pastorianus
aggattctactggacctatggctag

SEQ ID NO: 182696 - DNA, 25 bp, Saccharomyces pastorianus
tttaggttcagtagtgccacgagat

SEQ ID NO: 182697 - DNA, 25 bp, Saccharomyces pastorianus
ggcgctgtattgtttggtcactcca

SEQ ID NO: 182698 - DNA, 25 bp, Saccharomyces pastorianus
gatgctatttcaattgctcaggaga

SEQ ID NO: 182699 - DNA, 25 bp, Saccharomyces pastorianus
tgtcctttcaatcttactaccaatc

SEQ ID NO: 182700 - DNA, 25 bp, Saccharomyces pastorianus
cacgagatgctcatgttgtatccaa

SEQ ID NO: 182701 - DNA, 25 bp, Saccharomyces pastorianus
ggctagaactgtccgcgacgcaata

SEQ ID NO: 182702 - DNA, 25 bp, Saccharomyces pastorianus
tggacactacttgcggttcatggat

SEQ ID NO: 182703 - DNA, 25 bp, Saccharomyces pastorianus
gtagtgccagttctgtagctgccaa

SEQ ID NO: 182704 - DNA, 25 bp, Saccharomyces pastorianus
ggaggtagttcatctggtagtgcca

SEQ ID NO: 182705 - DNA, 25 bp, Saccharomyces pastorianus
gaaggcgatcctctggtagatttag

SEQ ID NO: 182706 - DNA, 25 bp, Saccharomyces pastorianus
agggccttcgccaatgatgaaaccc

SEQ ID NO: 182707 - DNA, 25 bp, Saccharomyces pastorianus
attcgctcttccaatgtagggcctt

SEQ ID NO: 182708 - DNA, 25 bp, Saccharomyces pastorianus
gcgatcctctggtagatttagcgat

SEQ ID NO: 182709 - DNA, 25 bp, Saccharomyces pastorianus
tcttccaatgtagggccttcgccaa

SEQ ID NO: 182710 - DNA, 25 bp, Saccharomyces pastorianus
cctctggtagatttagcgatatttc

SEQ ID NO: 182711 - DNA, 25 bp, Saccharomyces pastorianus
tcgccaatgatgaaacccgcacatt

SEQ ID NO: 182712 - DNA, 25 bp, Saccharomyces pastorianus
ggagagatcgcagggcattcgctct

SEQ ID NO: 182713 - DNA, 25 bp, Saccharomyces pastorianus
agggcattcgctcttccaatgtagg

SEQ ID NO: 182714 - DNA, 25 bp, Saccharomyces pastorianus
aacgtggagagatcgcagggcattc

SEQ ID NO: 182715 - DNA, 25 bp, Saccharomyces pastorianus
aatgtagggccttcgccaatgatga

SEQ ID NO: 182716 - DNA, 25 bp, Saccharomyces pastorianus
ctggacaaattgaacgcgagaaacg

SEQ ID NO: 182717 - DNA, 25 bp, Saccharomyces pastorianus
gaaagcttatcgaaagacctgaaaa

SEQ ID NO: 182718 - DNA, 25 bp, Saccharomyces pastorianus
gggttagagcaagatatcaacagat

SEQ ID NO: 182719 - DNA, 25 bp, Saccharomyces pastorianus
ggagtacaggatacgcgaagccaat

SEQ ID NO: 182720 - DNA, 25 bp, Saccharomyces pastorianus
aaaggaggtcgatcagaacgcagaa

SEQ ID NO: 182721 - DNA, 25 bp, Saccharomyces pastorianus
ggtcaatcaagaattagttcaacta

SEQ ID NO: 182722 - DNA, 25 bp, Saccharomyces pastorianus
gggaggttccaaaaggtcaatcaag

SEQ ID NO: 182723 - DNA, 25 bp, Saccharomyces pastorianus
agaaaagttcagtactcaatttttg

SEQ ID NO: 182724 - DNA, 25 bp, Saccharomyces pastorianus
gatacgcgaagccaataaatttgaa

SEQ ID NO: 182725 - DNA, 25 bp, Saccharomyces pastorianus
gttcaactaggctctaaactggaca

SEQ ID NO: 182726 - DNA, 25 bp, Saccharomyces pastorianus
caattgaaaactctcactgaaaaag

SEQ ID NO: 182727 - DNA, 25 bp, Saccharomyces pastorianus
atataggaagaactctacagctcga

SEQ ID NO: 182728 - DNA, 25 bp, Saccharomyces pastorianus
aagcagtcgctctcgttctattgtg

SEQ ID NO: 182729 - DNA, 25 bp, Saccharomyces pastorianus
atcaagcagtcgctctcgttctatt

SEQ ID NO: 182730 - DNA, 25 bp, Saccharomyces pastorianus
agtcgctctcgttctattgtgtgtt

SEQ ID NO: 182731 - DNA, 25 bp, Saccharomyces pastorianus
catcaaatcaatcaagcagtcgctc

SEQ ID NO: 182732 - DNA, 25 bp, Saccharomyces pastorianus
aatcaatcaagcagtcgctctcgtt

SEQ ID NO: 182733 - DNA, 25 bp, Saccharomyces pastorianus
ggaagaactctacagctcgaacaat

SEQ ID NO: 182734 - DNA, 25 bp, Saccharomyces pastorianus
tacagctcgaacaatacatcaaatc

SEQ ID NO: 182735 - DNA, 25 bp, Saccharomyces pastorianus
cgttctattgtgtgtttctcaccac

SEQ ID NO: 182736 - DNA, 25 bp, Saccharomyces pastorianus
gctctcgttctattgtgtgtttctc

SEQ ID NO: 182737 - DNA, 25 bp, Saccharomyces pastorianus
gaactctacagctcgaacaatacat

SEQ ID NO: 182738 - DNA, 25 bp, Saccharomyces pastorianus
gctcctcacggtacttacaacggtt

SEQ ID NO: 182739 - DNA, 25 bp, Saccharomyces pastorianus
aatggcacaccaagggcatcagtag

SEQ ID NO: 182740 - DNA, 25 bp, Saccharomyces pastorianus
aagccaacctggtactaggtgcgat

SEQ ID NO: 182741 - DNA, 25 bp, Saccharomyces pastorianus
gtgcaagcagtttcgctcgtacctt

SEQ ID NO: 182742 - DNA, 25 bp, Saccharomyces pastorianus
agataaagatctcggcattgctcaa

SEQ ID NO: 182743 - DNA, 25 bp, Saccharomyces pastorianus
gttcctaatacgagttacgcacccg

SEQ ID NO: 182744 - DNA, 25 bp, Saccharomyces pastorianus
gtgcgatttcccaccaaagattatc

SEQ ID NO: 182745 - DNA, 25 bp, Saccharomyces pastorianus
aagaagctcctaccaacggatcaag

SEQ ID NO: 182746 - DNA, 25 bp, Saccharomyces pastorianus
gactatgacccatcagttcctaata

SEQ ID NO: 182747 - DNA, 25 bp, Saccharomyces pastorianus
tcaagagcaggttctcgtgcaagca

SEQ ID NO: 182748 - DNA, 25 bp, Saccharomyces pastorianus
gctcaaattaacttgggcgacccac

SEQ ID NO: 182749 - DNA, 25 bp, Saccharomyces pastorianus
tttacgccatatgctaaccactcaa

SEQ ID NO: 182750 - DNA, 25 bp, Saccharomyces pastorianus
taccacttttacgccatatgctaac

SEQ ID NO: 182751 - DNA, 25 bp, Saccharomyces pastorianus
acttttacgccatatgctaaccact

SEQ ID NO: 182752 - DNA, 25 bp, Saccharomyces pastorianus
cacttttacgccatatgctaaccac

SEQ ID NO: 182753 - DNA, 25 bp, Saccharomyces pastorianus
ttttacgccatatgctaaccactca

SEQ ID NO: 182754 - DNA, 25 bp, Saccharomyces pastorianus
ataccacttttacgccatatgctaa

SEQ ID NO: 182755 - DNA, 25 bp, Saccharomyces pastorianus
tataccacttttacgccatatgcta

SEQ ID NO: 182756 - DNA, 25 bp, Saccharomyces pastorianus
acgccatatgctaaccactcaattt

SEQ ID NO: 182757 - DNA, 25 bp, Saccharomyces pastorianus
ttataccacttttacgccatatgct

SEQ ID NO: 182758 - DNA, 25 bp, Saccharomyces pastorianus
tacgccatatgctaaccactcaatt

SEQ ID NO: 182759 - DNA, 25 bp, Saccharomyces pastorianus
cttttacgccatatgctaaccactc

SEQ ID NO: 182760 - DNA, 25 bp, Saccharomyces pastorianus
ggctctccggacttggatttactag

SEQ ID NO: 182761 - DNA, 25 bp, Saccharomyces pastorianus
gaattactggatattgctctgctca

SEQ ID NO: 182762 - DNA, 25 bp, Saccharomyces pastorianus
tcccttccattgtctctagaaatta

SEQ ID NO: 182763 - DNA, 25 bp, Saccharomyces pastorianus
aggaaacgtttcctcgatgctccac

SEQ ID NO: 182764 - DNA, 25 bp, Saccharomyces pastorianus
tatagcgccaacatacagcacaacg

SEQ ID NO: 182765 - DNA, 25 bp, Saccharomyces pastorianus
tggattttatcaacattaacccgca

SEQ ID NO: 182766 - DNA, 25 bp, Saccharomyces pastorianus
tattgggttgccgaaggtttctagg

SEQ ID NO: 182767 - DNA, 25 bp, Saccharomyces pastorianus
atattgctctgctcaactctgggtc

SEQ ID NO: 182768 - DNA, 25 bp, Saccharomyces pastorianus
atacagcacaacgatggctctccgg

SEQ ID NO: 182769 - DNA, 25 bp, Saccharomyces pastorianus
gaccctggtttattgagtctgaacc

SEQ ID NO: 182770 - DNA, 25 bp, Saccharomyces pastorianus
ttcggattagaaacgcacatgcaag

SEQ ID NO: 182771 - DNA, 25 bp, Saccharomyces pastorianus
tactaaagcccaaaaccctatgcgt

SEQ ID NO: 182772 - DNA, 25 bp, Saccharomyces pastorianus
gtcttgaacatctccgtcggtgaat

SEQ ID NO: 182773 - DNA, 25 bp, Saccharomyces pastorianus
gcccaaaaccctatgcgtgatttga

SEQ ID NO: 182774 - DNA, 25 bp, Saccharomyces pastorianus
gtctactaaagcccaaaaccctatg

SEQ ID NO: 182775 - DNA, 25 bp, Saccharomyces pastorianus
tctactaaagcccaaaaccctatgc

SEQ ID NO: 182776 - DNA, 25 bp, Saccharomyces pastorianus
agaacaattgtctggtcaaactcca

SEQ ID NO: 182777 - DNA, 25 bp, Saccharomyces pastorianus
ccaaaaccctatgcgtgatttgaag

SEQ ID NO: 182778 - DNA, 25 bp, Saccharomyces pastorianus
aagcccaaaaccctatgcgtgattt

SEQ ID NO: 182779 - DNA, 25 bp, Saccharomyces pastorianus
agcctccaaggttttagaacaattg

SEQ ID NO: 182780 - DNA, 25 bp, Saccharomyces pastorianus
ctactaaagcccaaaaccctatgcg

SEQ ID NO: 182781 - DNA, 25 bp, Saccharomyces pastorianus
taaagcccaaaaccctatgcgtgat

SEQ ID NO: 182782 - DNA, 25 bp, Saccharomyces pastorianus
cactgctgcaatactttctgcacct

SEQ ID NO: 182783 - DNA, 25 bp, Saccharomyces pastorianus
atcactgctgcaatactttctgcac

SEQ ID NO: 182784 - DNA, 25 bp, Saccharomyces pastorianus
actgctgcaatactttctgcacctg

SEQ ID NO: 182785 - DNA, 25 bp, Saccharomyces pastorianus
catcactgctgcaatactttctgca

SEQ ID NO: 182786 - DNA, 25 bp, Saccharomyces pastorianus
atgaatgcacgtgtcgctgtcctca

SEQ ID NO: 182787 - DNA, 25 bp, Saccharomyces pastorianus
cgctgtcctcatcactgctgcaata

SEQ ID NO: 182788 - DNA, 25 bp, Saccharomyces pastorianus
ctgctgcaatactttctgcacctgt

SEQ ID NO: 182789 - DNA, 25 bp, Saccharomyces pastorianus
tcatcactgctgcaatactttctgc

SEQ ID NO: 182790 - DNA, 25 bp, Saccharomyces pastorianus
tgctgcaatactttctgcacctgtc

SEQ ID NO: 182791 - DNA, 25 bp, Saccharomyces pastorianus
tgaatgcacgtgtcgctgtcctcat

SEQ ID NO: 182792 - DNA, 25 bp, Saccharomyces pastorianus
tcactgctgcaatactttctgcacc

SEQ ID NO: 182793 - DNA, 25 bp, Saccharomyces pastorianus
attcatgttaattgcgctcgccaac

SEQ ID NO: 182794 - DNA, 25 bp, Saccharomyces pastorianus
gcaatggttccattttacggccaag

SEQ ID NO: 182795 - DNA, 25 bp, Saccharomyces pastorianus
aacagtgacggctcgttcacttcaa

SEQ ID NO: 182796 - DNA, 25 bp, Saccharomyces pastorianus
acatcccgcctactgaggaattcaa

SEQ ID NO: 182797 - DNA, 25 bp, Saccharomyces pastorianus
atttgcacatttggcctcgtcataa

SEQ ID NO: 182798 - DNA, 25 bp, Saccharomyces pastorianus
ttttgcaatagctcctgaccatttg

SEQ ID NO: 182799 - DNA, 25 bp, Saccharomyces pastorianus
ggaagatttgaaaaccccacatact

SEQ ID NO: 182800 - DNA, 25 bp, Saccharomyces pastorianus
gacggagcatactctgcgacgagat

SEQ ID NO: 182801 - DNA, 25 bp, Saccharomyces pastorianus
tgtaccaggcggaaaggccatccta

SEQ ID NO: 182802 - DNA, 25 bp, Saccharomyces pastorianus
gttacattgaactttacatcccgcc

SEQ ID NO: 182803 - DNA, 25 bp, Saccharomyces pastorianus
ataacttccaagtcacgtgtgaggg

SEQ ID NO: 182804 - DNA, 25 bp, Saccharomyces pastorianus
cccagcagcagatatagtgttcgaa

SEQ ID NO: 182805 - DNA, 25 bp, Saccharomyces pastorianus
ttacggatagattacctaacgctgg

SEQ ID NO: 182806 - DNA, 25 bp, Saccharomyces pastorianus
gggattgaaccaagctgcggccatt

SEQ ID NO: 182807 - DNA, 25 bp, Saccharomyces pastorianus
caagctgcggccattggtaaattaa

SEQ ID NO: 182808 - DNA, 25 bp, Saccharomyces pastorianus
gattacctaacgctggagaaacttt

SEQ ID NO: 182809 - DNA, 25 bp, Saccharomyces pastorianus
agggctaaccacttcgaaacacatg

SEQ ID NO: 182810 - DNA, 25 bp, Saccharomyces pastorianus
acatgctggtggtaagggattgaac

SEQ ID NO: 182811 - DNA, 25 bp, Saccharomyces pastorianus
acttcgaaacacatgctggtggtaa

SEQ ID NO: 182812 - DNA, 25 bp, Saccharomyces pastorianus
tagtgttcgaatgattggtaatgtt

SEQ ID NO: 182813 - DNA, 25 bp, Saccharomyces pastorianus
gagaaactttcagggctaaccactt

SEQ ID NO: 182814 - DNA, 25 bp, Saccharomyces pastorianus
gctaaccacttcgaaacacatgctg

SEQ ID NO: 182815 - DNA, 25 bp, Saccharomyces pastorianus
tggtggcctgataccgcagtggaaa

SEQ ID NO: 182816 - DNA, 25 bp, Saccharomyces pastorianus
tatttgataagttcatctctgtcga

SEQ ID NO: 182817 - DNA, 25 bp, Saccharomyces pastorianus
aaaggattttggctatgtgtgttaa

SEQ ID NO: 182818 - DNA, 25 bp, Saccharomyces pastorianus
taatagatctttgccatgacttccc

SEQ ID NO: 182819 - DNA, 25 bp, Saccharomyces pastorianus
aactttactgaaattggtggcctga

SEQ ID NO: 182820 - DNA, 25 bp, Saccharomyces pastorianus
taaggctaatctctcatcaaatgtt

SEQ ID NO: 182821 - DNA, 25 bp, Saccharomyces pastorianus
gaagagtatggctaccttattcagg

SEQ ID NO: 182822 - DNA, 25 bp, Saccharomyces pastorianus
gagttacataaggtctcctcgcagt

SEQ ID NO: 182823 - DNA, 25 bp, Saccharomyces pastorianus
gaacctgtgacgaaggtatcatcac

SEQ ID NO: 182824 - DNA, 25 bp, Saccharomyces pastorianus
tcccgcacttaacaccgaaattaca

SEQ ID NO: 182825 - DNA, 25 bp, Saccharomyces pastorianus
gatagtgcaaacgtcgagctgttta

SEQ ID NO: 182826 - DNA, 25 bp, Saccharomyces pastorianus
tgttgttgttggtcgggctcgtctt

SEQ ID NO: 182827 - DNA, 25 bp, Saccharomyces pastorianus
ttgttgttgttgctgttgttgttgt

SEQ ID NO: 182828 - DNA, 25 bp, Saccharomyces pastorianus
gtcgggctcgtcttggaacccattt

SEQ ID NO: 182829 - DNA, 25 bp, Saccharomyces pastorianus
cggttgttgttgttgctgttgttgt

SEQ ID NO: 182830 - DNA, 25 bp, Saccharomyces pastorianus
tgttggtcgggctcgtcttggaacc

SEQ ID NO: 182831 - DNA, 25 bp, Saccharomyces pastorianus
ctgttgttgttgttgttgttgttgt

SEQ ID NO: 182832 - DNA, 25 bp, Saccharomyces pastorianus
ggtcgggctcgtcttggaacccatt

SEQ ID NO: 182833 - DNA, 25 bp, Saccharomyces pastorianus
tggtcgggctcgtcttggaacccat

SEQ ID NO: 182834 - DNA, 25 bp, Saccharomyces pastorianus
ttggtcgggctcgtcttggaaccca

SEQ ID NO: 182835 - DNA, 25 bp, Saccharomyces pastorianus
ggcggttgttgttgttgctgttgtt

SEQ ID NO: 182836 - DNA, 25 bp, Saccharomyces pastorianus
ttgttgttgttggtcgggctcgtct

SEQ ID NO: 182837 - DNA, 25 bp, Saccharomyces pastorianus
actggctatagttgttggatggata

SEQ ID NO: 182838 - DNA, 25 bp, Saccharomyces pastorianus
ctggctatagttgttggatggatat

SEQ ID NO: 182839 - DNA, 25 bp, Saccharomyces pastorianus
tatgtagaccatattattaagaaga

SEQ ID NO: 182840 - DNA, 25 bp, Saccharomyces pastorianus
gatattcattattatgtagaccata

SEQ ID NO: 182841 - DNA, 25 bp, Saccharomyces pastorianus
gtttcaataaatgcgtgactggcta

SEQ ID NO: 182842 - DNA, 25 bp, Saccharomyces pastorianus
taagaagaatgcaattaggcccgac

SEQ ID NO: 182843 - DNA, 25 bp, Saccharomyces pastorianus
ggatattcattattatgtagaccat

SEQ ID NO: 182844 - DNA, 25 bp, Saccharomyces pastorianus
tgtagaccatattattaagaagaat

SEQ ID NO: 182845 - DNA, 25 bp, Saccharomyces pastorianus
gctatagttgttggatggatattca

SEQ ID NO: 182846 - DNA, 25 bp, Saccharomyces pastorianus
gttgttggatggatattcattatta

SEQ ID NO: 182847 - DNA, 25 bp, Saccharomyces pastorianus
gttggatggatattcattattatgt

SEQ ID NO: 182848 - DNA, 25 bp, Saccharomyces pastorianus
aacaacaggtcccattgctttgcaa

SEQ ID NO: 182849 - DNA, 25 bp, Saccharomyces pastorianus
gtcccattgctttgcaagagctttc

SEQ ID NO: 182850 - DNA, 25 bp, Saccharomyces pastorianus
caggtcccattgctttgcaagagct

SEQ ID NO: 182851 - DNA, 25 bp, Saccharomyces pastorianus
tcccattgctttgcaagagctttct

SEQ ID NO: 182852 - DNA, 25 bp, Saccharomyces pastorianus
caacaggtcccattgctttgcaaga

SEQ ID NO: 182853 - DNA, 25 bp, Saccharomyces pastorianus
aacaggtcccattgctttgcaagag

SEQ ID NO: 182854 - DNA, 25 bp, Saccharomyces pastorianus
ggtcccattgctttgcaagagcttt

SEQ ID NO: 182855 - DNA, 25 bp, Saccharomyces pastorianus
aggtcccattgctttgcaagagctt

SEQ ID NO: 182856 - DNA, 25 bp, Saccharomyces pastorianus
cccattgctttgcaagagctttcta

SEQ ID NO: 182857 - DNA, 25 bp, Saccharomyces pastorianus
acaacaggtcccattgctttgcaag

SEQ ID NO: 182858 - DNA, 25 bp, Saccharomyces pastorianus
acaggtcccattgctttgcaagagc

SEQ ID NO: 182859 - DNA, 25 bp, Saccharomyces pastorianus
agaacttgcctctgagcaaactcca

SEQ ID NO: 182860 - DNA, 25 bp, Saccharomyces pastorianus
attttgtttctctaggccattcagg

SEQ ID NO: 182861 - DNA, 25 bp, Saccharomyces pastorianus
ttacccattaccaaaggcgacggat

SEQ ID NO: 182862 - DNA, 25 bp, Saccharomyces pastorianus
tacaaaccgggtgtaccgctggtag

SEQ ID NO: 182863 - DNA, 25 bp, Saccharomyces pastorianus
gagcgcaagagttcgttcatctacg

SEQ ID NO: 182864 - DNA, 25 bp, Saccharomyces pastorianus
ttcgtcaaaattgcccggatgcttt

SEQ ID NO: 182865 - DNA, 25 bp, Saccharomyces pastorianus
aagcaatcctttcctctttgttgag

SEQ ID NO: 182866 - DNA, 25 bp, Saccharomyces pastorianus
gattccgcccctaagtcagttaaag

SEQ ID NO: 182867 - DNA, 25 bp, Saccharomyces pastorianus
gttattggcattggcatctccacaa

SEQ ID NO: 182868 - DNA, 25 bp, Saccharomyces pastorianus
aaagcattgagaacgattccgcccc

SEQ ID NO: 182869 - DNA, 25 bp, Saccharomyces pastorianus
accgctggtagctttcaaattgtcc

SEQ ID NO: 182870 - DNA, 25 bp, Saccharomyces pastorianus
atcggcaacactgaacacttggctt

SEQ ID NO: 182871 - DNA, 25 bp, Saccharomyces pastorianus
tggctacgaaggaggtcaggaaaac

SEQ ID NO: 182872 - DNA, 25 bp, Saccharomyces pastorianus
gaatatattgataggtccaccagag

SEQ ID NO: 182873 - DNA, 25 bp, Saccharomyces pastorianus
ggtccaccagagttgagattttcta

SEQ ID NO: 182874 - DNA, 25 bp, Saccharomyces pastorianus
aaagctgcctttcttcttgcagaaa

SEQ ID NO: 182875 - DNA, 25 bp, Saccharomyces pastorianus
cacaaaattatggatggctacgaag

SEQ ID NO: 182876 - DNA, 25 bp, Saccharomyces pastorianus
gcagaaaagaagacccgactaaatc

SEQ ID NO: 182877 - DNA, 25 bp, Saccharomyces pastorianus
aagcatggtaacaattcaggatcaa

SEQ ID NO: 182878 - DNA, 25 bp, Saccharomyces pastorianus
tttgccgaagcagtcatctagtaat

SEQ ID NO: 182879 - DNA, 25 bp, Saccharomyces pastorianus
ggtaatagttctttatcggcaacac

SEQ ID NO: 182880 - DNA, 25 bp, Saccharomyces pastorianus
gattttgcagaaattttgccgaagc

SEQ ID NO: 182881 - DNA, 25 bp, Saccharomyces pastorianus
attcaacggatgatgatttggctga

SEQ ID NO: 182882 - DNA, 25 bp, Saccharomyces pastorianus
atttggctgaagatgatgtagctga

SEQ ID NO: 182883 - DNA, 25 bp, Saccharomyces pastorianus
tggatgatgatttggctgatgatgt

SEQ ID NO: 182884 - DNA, 25 bp, Saccharomyces pastorianus
gctgaagatgaagtggatgatgatt

SEQ ID NO: 182885 - DNA, 25 bp, Saccharomyces pastorianus
atgatgtagcggatgatgattcaac

SEQ ID NO: 182886 - DNA, 25 bp, Saccharomyces pastorianus
atttggctgatgatgtagccgaaga

SEQ ID NO: 182887 - DNA, 25 bp, Saccharomyces pastorianus
gaagaactaacggaacttgaagaag

SEQ ID NO: 182888 - DNA, 25 bp, Saccharomyces pastorianus
ttgttggaagaactaacggaacttg

SEQ ID NO: 182889 - DNA, 25 bp, Saccharomyces pastorianus
gtagcggatgatgattcaacggatg

SEQ ID NO: 182890 - DNA, 25 bp, Saccharomyces pastorianus
aacggatgatgatttggctgaagat

SEQ ID NO: 182891 - DNA, 25 bp, Saccharomyces pastorianus
aagaaacggatgtagcggatgatga

SEQ ID NO: 182892 - DNA, 25 bp, Saccharomyces pastorianus
aaagaactttcacttcttcctctgt

SEQ ID NO: 182893 - DNA, 25 bp, Saccharomyces pastorianus
cctataggacttgtgcggtggcaga

SEQ ID NO: 182894 - DNA, 25 bp, Saccharomyces pastorianus
gaagcacctaagtctgtcattgaac

SEQ ID NO: 182895 - DNA, 25 bp, Saccharomyces pastorianus
aagggttctgactggctcggagacc

SEQ ID NO: 182896 - DNA, 25 bp, Saccharomyces pastorianus
ttacggtatgcccttttcgaggact

SEQ ID NO: 182897 - DNA, 25 bp, Saccharomyces pastorianus
gagcagctttcggtttggctgaagc

SEQ ID NO: 182898 - DNA, 25 bp, Saccharomyces pastorianus
gaaatctgaatcgaaaccgccggcc

SEQ ID NO: 182899 - DNA, 25 bp, Saccharomyces pastorianus
aaaccgccggccaaatatcatatta

SEQ ID NO: 182900 - DNA, 25 bp, Saccharomyces pastorianus
aaggtcacatactgtggctgctcag

SEQ ID NO: 182901 - DNA, 25 bp, Saccharomyces pastorianus
cttcctctgttgttcgtcaaattgg

SEQ ID NO: 182902 - DNA, 25 bp, Saccharomyces pastorianus
gaacaggtcacgcaatgcttcatac

SEQ ID NO: 182903 - DNA, 25 bp, Saccharomyces pastorianus
ttttacaccgtatactaaccactca

SEQ ID NO: 182904 - DNA, 25 bp, Saccharomyces pastorianus
cacttatgccaatattacagaaaaa

SEQ ID NO: 182905 - DNA, 25 bp, Saccharomyces pastorianus
acttatgccaatattacagaaaaat

SEQ ID NO: 182906 - DNA, 25 bp, Saccharomyces pastorianus
tattacagaaaaatcaccactaaaa

SEQ ID NO: 182907 - DNA, 25 bp, Saccharomyces pastorianus
tacagaaaaatcaccactaaaatca

SEQ ID NO: 182908 - DNA, 25 bp, Saccharomyces pastorianus
tgccaatattacagaaaaatcacca

SEQ ID NO: 182909 - DNA, 25 bp, Saccharomyces pastorianus
ttacagaaaaatcaccactaaaatc

SEQ ID NO: 182910 - DNA, 25 bp, Saccharomyces pastorianus
cagaaaaatcaccactaaaatcacc

SEQ ID NO: 182911 - DNA, 25 bp, Saccharomyces pastorianus
attacagaaaaatcaccactaaaat

SEQ ID NO: 182912 - DNA, 25 bp, Saccharomyces pastorianus
aatattacagaaaaatcaccactaa

SEQ ID NO: 182913 - DNA, 25 bp, Saccharomyces pastorianus
atattacagaaaaatcaccactaaa

SEQ ID NO: 182914 - DNA, 25 bp, Saccharomyces pastorianus
acaggtttgctgactgtctgcgtag

SEQ ID NO: 182915 - DNA, 25 bp, Saccharomyces pastorianus
agtagatgttgttaggcccctcaag

SEQ ID NO: 182916 - DNA, 25 bp, Saccharomyces pastorianus
ggtctttctatctcgctatgcagta

SEQ ID NO: 182917 - DNA, 25 bp, Saccharomyces pastorianus
gataggcgaatcagttcccttagaa

SEQ ID NO: 182918 - DNA, 25 bp, Saccharomyces pastorianus
tgggacatatttgcctcgaacttta

SEQ ID NO: 182919 - DNA, 25 bp, Saccharomyces pastorianus
tgtctgcgtagctacggtgcgcaag

SEQ ID NO: 182920 - DNA, 25 bp, Saccharomyces pastorianus
gaaacgttcttcgtagtcgatgctg

SEQ ID NO: 182921 - DNA, 25 bp, Saccharomyces pastorianus
agtgctgtccgatctgaaagccatt

SEQ ID NO: 182922 - DNA, 25 bp, Saccharomyces pastorianus
ttaagcagacttcgccggaaacgtt

SEQ ID NO: 182923 - DNA, 25 bp, Saccharomyces pastorianus
gtatccactgggacattttctgaca

SEQ ID NO: 182924 - DNA, 25 bp, Saccharomyces pastorianus
gttgacacttcaacggcagtgctgt

SEQ ID NO: 182925 - DNA, 25 bp, Saccharomyces pastorianus
gatgttgttcatttcttcgacctta

SEQ ID NO: 182926 - DNA, 25 bp, Saccharomyces pastorianus
gtgacgacgagaagcagcaatgatg

SEQ ID NO: 182927 - DNA, 25 bp, Saccharomyces pastorianus
gaagcagcaatgatgttgttcattt

SEQ ID NO: 182928 - DNA, 25 bp, Saccharomyces pastorianus
gaccttagccttggctctggtgaaa

SEQ ID NO: 182929 - DNA, 25 bp, Saccharomyces pastorianus
gacgacgagaagcagcaatgatgtt

SEQ ID NO: 182930 - DNA, 25 bp, Saccharomyces pastorianus
aaagaacccaatctcttcttggcga

SEQ ID NO: 182931 - DNA, 25 bp, Saccharomyces pastorianus
cgagaagcagcaatgatgttgttca

SEQ ID NO: 182932 - DNA, 25 bp, Saccharomyces pastorianus
gccttggctctggtgaaagaaccca

SEQ ID NO: 182933 - DNA, 25 bp, Saccharomyces pastorianus
agcagcaatgatgttgttcatttct

SEQ ID NO: 182934 - DNA, 25 bp, Saccharomyces pastorianus
ttcatttcttcgaccttagccttgg

SEQ ID NO: 182935 - DNA, 25 bp, Saccharomyces pastorianus
gacgagaagcagcaatgatgttgtt

SEQ ID NO: 182936 - DNA, 25 bp, Saccharomyces pastorianus
acacgcgttccttggagtttttgca

SEQ ID NO: 182937 - DNA, 25 bp, Saccharomyces pastorianus
atttcccaatgcgttgtacttcaag

SEQ ID NO: 182938 - DNA, 25 bp, Saccharomyces pastorianus
gaaatttcaaattccctagctacga

SEQ ID NO: 182939 - DNA, 25 bp, Saccharomyces pastorianus
ggaagattccaattataaccaaatg

SEQ ID NO: 182940 - DNA, 25 bp, Saccharomyces pastorianus
atgttaaattcaagcagtcacctgg

SEQ ID NO: 182941 - DNA, 25 bp, Saccharomyces pastorianus
agtgacagtggaaacctgcctaaaa

SEQ ID NO: 182942 - DNA, 25 bp, Saccharomyces pastorianus
gctacgaattgtcttatcactggtt

SEQ ID NO: 182943 - DNA, 25 bp, Saccharomyces pastorianus
gcaatctcgattttagccgtatcaa

SEQ ID NO: 182944 - DNA, 25 bp, Saccharomyces pastorianus
gggacaacgattacgggcgacacgc

SEQ ID NO: 182945 - DNA, 25 bp, Saccharomyces pastorianus
gtttttgcacaacttcttcgtagag

SEQ ID NO: 182946 - DNA, 25 bp, Saccharomyces pastorianus
tacgacgaagcattgcacgtgtatg

SEQ ID NO: 182947 - DNA, 25 bp, Saccharomyces pastorianus
ggcaccctacatgtttttgttacta

SEQ ID NO: 182948 - DNA, 25 bp, Saccharomyces pastorianus
ctgactttgtttctggcgcacctat

SEQ ID NO: 182949 - DNA, 25 bp, Saccharomyces pastorianus
tttcactgactttgtttctggcgca

SEQ ID NO: 182950 - DNA, 25 bp, Saccharomyces pastorianus
ctttcactgactttgtttctggcgc

SEQ ID NO: 182951 - DNA, 25 bp, Saccharomyces pastorianus
ttcactgactttgtttctggcgcac

SEQ ID NO: 182952 - DNA, 25 bp, Saccharomyces pastorianus
gtacaatttggcaccctacatgttt

SEQ ID NO: 182953 - DNA, 25 bp, Saccharomyces pastorianus
tgtttctggcgcacctattgtaagg

SEQ ID NO: 182954 - DNA, 25 bp, Saccharomyces pastorianus
tggcgcacctattgtaaggagtctt

SEQ ID NO: 182955 - DNA, 25 bp, Saccharomyces pastorianus
cactgactttgtttctggcgcacct

SEQ ID NO: 182956 - DNA, 25 bp, Saccharomyces pastorianus
actgactttgtttctggcgcaccta

SEQ ID NO: 182957 - DNA, 25 bp, Saccharomyces pastorianus
tcactgactttgtttctggcgcacc

SEQ ID NO: 182958 - DNA, 25 bp, Saccharomyces pastorianus
gaagacctccaaacggtattagact

SEQ ID NO: 182959 - DNA, 25 bp, Saccharomyces pastorianus
ggtaagacgctatagaggcctcatt

SEQ ID NO: 182960 - DNA, 25 bp, Saccharomyces pastorianus
gaggttcccttatttggcttttgcg

SEQ ID NO: 182961 - DNA, 25 bp, Saccharomyces pastorianus
gggaccttggactctaatggtttat

SEQ ID NO: 182962 - DNA, 25 bp, Saccharomyces pastorianus
aaggcaatcaccatgacaaggatca

SEQ ID NO: 182963 - DNA, 25 bp, Saccharomyces pastorianus
tccacatttcccagaacctttaaga

SEQ ID NO: 182964 - DNA, 25 bp, Saccharomyces pastorianus
tcgtgatttctttcaaacttgcagg

SEQ ID NO: 182965 - DNA, 25 bp, Saccharomyces pastorianus
cggtggatcccgtcttttcagattt

SEQ ID NO: 182966 - DNA, 25 bp, Saccharomyces pastorianus
aggtcgttacctgccggaatatcac

SEQ ID NO: 182967 - DNA, 25 bp, Saccharomyces pastorianus
gatatcttagttattccgcaagcca

SEQ ID NO: 182968 - DNA, 25 bp, Saccharomyces pastorianus
gttattccgcaagccatgggtatga

SEQ ID NO: 182969 - DNA, 25 bp, Saccharomyces pastorianus
tacagattatgcttggaccagttgg

SEQ ID NO: 182970 - DNA, 25 bp, Saccharomyces pastorianus
gtccggatgccgaaagatcagggtc

SEQ ID NO: 182971 - DNA, 25 bp, Saccharomyces pastorianus
cactgtggcagtgacgacgattaca

SEQ ID NO: 182972 - DNA, 25 bp, Saccharomyces pastorianus
taactctttggtgcggtccggatgc

SEQ ID NO: 182973 - DNA, 25 bp, Saccharomyces pastorianus
gtcgttgattttgaccaggtctcac

SEQ ID NO: 182974 - DNA, 25 bp, Saccharomyces pastorianus
atactaaatgatgttggcacgccaa

SEQ ID NO: 182975 - DNA, 25 bp, Saccharomyces pastorianus
ggaaactgataactgccactgcact

SEQ ID NO: 182976 - DNA, 25 bp, Saccharomyces pastorianus
caatatgttgttgtcgtgggagcag

SEQ ID NO: 182977 - DNA, 25 bp, Saccharomyces pastorianus
gaccaggtctcactaagttcactaa

SEQ ID NO: 182978 - DNA, 25 bp, Saccharomyces pastorianus
ttggatcttgggtggttaactcttt

SEQ ID NO: 182979 - DNA, 25 bp, Saccharomyces pastorianus
aactgccactgcactattcactgtg

SEQ ID NO: 182980 - DNA, 25 bp, Saccharomyces pastorianus
gccaagcgaaagttatttgaacaat

SEQ ID NO: 182981 - DNA, 25 bp, Saccharomyces pastorianus
ggtatcgatggtggtaatgccaagc

SEQ ID NO: 182982 - DNA, 25 bp, Saccharomyces pastorianus
cattggtatcgatggtggtaatgcc

SEQ ID NO: 182983 - DNA, 25 bp, Saccharomyces pastorianus
ttaggcggagaaatattcatcgatt

SEQ ID NO: 182984 - DNA, 25 bp, Saccharomyces pastorianus
agttatttgaacaattaggcggaga

SEQ ID NO: 182985 - DNA, 25 bp, Saccharomyces pastorianus
tggtaatgccaagcgaaagttattt

SEQ ID NO: 182986 - DNA, 25 bp, Saccharomyces pastorianus
ggttacagggtcattggtatcgatg

SEQ ID NO: 182987 - DNA, 25 bp, Saccharomyces pastorianus
tggtggtaatgccaagcgaaagtta

SEQ ID NO: 182988 - DNA, 25 bp, Saccharomyces pastorianus
tacagggtcattggtatcgatggtg

SEQ ID NO: 182989 - DNA, 25 bp, Saccharomyces pastorianus
agaaatattcatcgatttcacggaa

SEQ ID NO: 182990 - DNA, 25 bp, Saccharomyces pastorianus
atcgatggtggtaatgccaagcgaa

SEQ ID NO: 182991 - DNA, 25 bp, Saccharomyces pastorianus
gagaaggtttttctacacaccctcg

SEQ ID NO: 182992 - DNA, 25 bp, Saccharomyces pastorianus
agacgcactaacttcctttaatttg

SEQ ID NO: 182993 - DNA, 25 bp, Saccharomyces pastorianus
aacttgattcgactgtggcgagaac

SEQ ID NO: 182994 - DNA, 25 bp, Saccharomyces pastorianus
tacacaccctcgtttgagatatatg

SEQ ID NO: 182995 - DNA, 25 bp, Saccharomyces pastorianus
cgggtcctgagttgaatctcgtcat

SEQ ID NO: 182996 - DNA, 25 bp, Saccharomyces pastorianus
tgctaactccttacgatgtgttgaa

SEQ ID NO: 182997 - DNA, 25 bp, Saccharomyces pastorianus
gatgtgccgaaatcctaagactggg

SEQ ID NO: 182998 - DNA, 25 bp, Saccharomyces pastorianus
aacatgcttcaggttgatgggccaa

SEQ ID NO: 182999 - DNA, 25 bp, Saccharomyces pastorianus
tgatgggccaatgctaactccttac

SEQ ID NO: 183000 - DNA, 25 bp, Saccharomyces pastorianus
gggaatactacagagcagaccattt

SEQ ID NO: 183001 - DNA, 25 bp, Saccharomyces pastorianus
gcctccgggttgtcagttgcaaaat

SEQ ID NO: 183002 - DNA, 25 bp, Saccharomyces pastorianus
tctttgagttgtcttttccttctgt

SEQ ID NO: 183003 - DNA, 25 bp, Saccharomyces pastorianus
atcatcgtcatcaaattcaccctct

SEQ ID NO: 183004 - DNA, 25 bp, Saccharomyces pastorianus
cttctgtctcttaggatttggcttt

SEQ ID NO: 183005 - DNA, 25 bp, Saccharomyces pastorianus
gggagctctgttttctgaatgcagt

SEQ ID NO: 183006 - DNA, 25 bp, Saccharomyces pastorianus
ttaagtttcttaagcgtgccgcatt

SEQ ID NO: 183007 - DNA, 25 bp, Saccharomyces pastorianus
ttcgtactcgtttcttctggtggct

SEQ ID NO: 183008 - DNA, 25 bp, Saccharomyces pastorianus
attgtcttcgtcgacttcttcttct

SEQ ID NO: 183009 - DNA, 25 bp, Saccharomyces pastorianus
tgccgcaccttctctttttaagttt

SEQ ID NO: 183010 - DNA, 25 bp, Saccharomyces pastorianus
ttggctttgtttcttttccagttct

SEQ ID NO: 183011 - DNA, 25 bp, Saccharomyces pastorianus
taaaaagtcgtcttcttcgtactcg

SEQ ID NO: 183012 - DNA, 25 bp, Saccharomyces pastorianus
tcttctggtggctccatatgcagta

SEQ ID NO: 183013 - DNA, 25 bp, Saccharomyces pastorianus
tgctgtcctcatcactgctgcaata

SEQ ID NO: 183014 - DNA, 25 bp, Saccharomyces pastorianus
gttgctgtcctcatcactgctgcaa

SEQ ID NO: 183015 - DNA, 25 bp, Saccharomyces pastorianus
atcactgctgcaatactttctgtac

SEQ ID NO: 183016 - DNA, 25 bp, Saccharomyces pastorianus
actgctgcaatactttctgtacctg

SEQ ID NO: 183017 - DNA, 25 bp, Saccharomyces pastorianus
acgtgttgctgtcctcatcactgct

SEQ ID NO: 183018 - DNA, 25 bp, Saccharomyces pastorianus
ctgcaatactttctgtacctgtcac

SEQ ID NO: 183019 - DNA, 25 bp, Saccharomyces pastorianus
gcacgtgttgctgtcctcatcactg

SEQ ID NO: 183020 - DNA, 25 bp, Saccharomyces pastorianus
cgtgttgctgtcctcatcactgctg

SEQ ID NO: 183021 - DNA, 25 bp, Saccharomyces pastorianus
tgcacgtgttgctgtcctcatcact

SEQ ID NO: 183022 - DNA, 25 bp, Saccharomyces pastorianus
ttgctgtcctcatcactgctgcaat

SEQ ID NO: 183023 - DNA, 25 bp, Saccharomyces pastorianus
tgttgctgtcctcatcactgctgca

SEQ ID NO: 183024 - DNA, 25 bp, Saccharomyces pastorianus
ggccaagaacaactgaatgatcaaa

SEQ ID NO: 183025 - DNA, 25 bp, Saccharomyces pastorianus
ggaacttgttgaaatatcactgtga

SEQ ID NO: 183026 - DNA, 25 bp, Saccharomyces pastorianus
ttttcttgaagatttggacctttgc

SEQ ID NO: 183027 - DNA, 25 bp, Saccharomyces pastorianus
gaagatttggacctttgcaactgat

SEQ ID NO: 183028 - DNA, 25 bp, Saccharomyces pastorianus
gagcattcctagaacaagttttttc

SEQ ID NO: 183029 - DNA, 25 bp, Saccharomyces pastorianus
acgtggccaagaacaactgaatgat

SEQ ID NO: 183030 - DNA, 25 bp, Saccharomyces pastorianus
aattgcgccaatttgctactgatca

SEQ ID NO: 183031 - DNA, 25 bp, Saccharomyces pastorianus
ggacctttgcaactgatgtaactaa

SEQ ID NO: 183032 - DNA, 25 bp, Saccharomyces pastorianus
gatgtaactaagatggaacgtggcc

SEQ ID NO: 183033 - DNA, 25 bp, Saccharomyces pastorianus
gcgccaatttgctactgatcaagat

SEQ ID NO: 183034 - DNA, 25 bp, Saccharomyces pastorianus
gatttggacctttgcaactgatgta

SEQ ID NO: 183035 - DNA, 25 bp, Saccharomyces pastorianus
ggcctccgaacgtgcgcaagaaaac

SEQ ID NO: 183036 - DNA, 25 bp, Saccharomyces pastorianus
gtaaggcctggctctattgctgcag

SEQ ID NO: 183037 - DNA, 25 bp, Saccharomyces pastorianus
aagattttggtagctctccttcaaa

SEQ ID NO: 183038 - DNA, 25 bp, Saccharomyces pastorianus
gaaaacactttgaactctgcgaaaa

SEQ ID NO: 183039 - DNA, 25 bp, Saccharomyces pastorianus
gaccaatgacacagtgattactata

SEQ ID NO: 183040 - DNA, 25 bp, Saccharomyces pastorianus
ctctgcgaaaaatcctgtgttagtg

SEQ ID NO: 183041 - DNA, 25 bp, Saccharomyces pastorianus
caaagtgaagtctgccccggtgatc

SEQ ID NO: 183042 - DNA, 25 bp, Saccharomyces pastorianus
gctgggagcaatagctctaatgcta

SEQ ID NO: 183043 - DNA, 25 bp, Saccharomyces pastorianus
tgctgcagccgctttacaagcaaat

SEQ ID NO: 183044 - DNA, 25 bp, Saccharomyces pastorianus
gatcgcacccgctaaagttggacag

SEQ ID NO: 183045 - DNA, 25 bp, Saccharomyces pastorianus
ggaccctctactggctaatttgaac

SEQ ID NO: 183046 - DNA, 25 bp, Saccharomyces pastorianus
gtagtacttaagcaaacggccgaag

SEQ ID NO: 183047 - DNA, 25 bp, Saccharomyces pastorianus
ctccggcacaaggtttagatgatat

SEQ ID NO: 183048 - DNA, 25 bp, Saccharomyces pastorianus
agatgatggcagctcaacgtcaatc

SEQ ID NO: 183049 - DNA, 25 bp, Saccharomyces pastorianus
ataaccgcatgatacagggtacgaa

SEQ ID NO: 183050 - DNA, 25 bp, Saccharomyces pastorianus
taggttgtctcgagttcattgcttc

SEQ ID NO: 183051 - DNA, 25 bp, Saccharomyces pastorianus
aaagcctggagattcagcaaggtgt

SEQ ID NO: 183052 - DNA, 25 bp, Saccharomyces pastorianus
aactttacaaccattgcctgacagc

SEQ ID NO: 183053 - DNA, 25 bp, Saccharomyces pastorianus
aagcatgtatgaatctccggcacaa

SEQ ID NO: 183054 - DNA, 25 bp, Saccharomyces pastorianus
gagttcattgcttcattttcaaaaa

SEQ ID NO: 183055 - DNA, 25 bp, Saccharomyces pastorianus
ttggtattgccacaccggaactaat

SEQ ID NO: 183056 - DNA, 25 bp, Saccharomyces pastorianus
actacaggtctgtttaacgagggat

SEQ ID NO: 183057 - DNA, 25 bp, Saccharomyces pastorianus
gcagccgccatttcacagattaata

SEQ ID NO: 183058 - DNA, 25 bp, Saccharomyces pastorianus
aaggcaggcattgatttttgtaaaa

SEQ ID NO: 183059 - DNA, 25 bp, Saccharomyces pastorianus
gaaggtagttatctgtacctcgata

SEQ ID NO: 183060 - DNA, 25 bp, Saccharomyces pastorianus
gtggaattactcataaggcaggcat

SEQ ID NO: 183061 - DNA, 25 bp, Saccharomyces pastorianus
tgtacctcgataatggcaccagggt

SEQ ID NO: 183062 - DNA, 25 bp, Saccharomyces pastorianus
tttgtaaaaaagttgctcgccttat

SEQ ID NO: 183063 - DNA, 25 bp, Saccharomyces pastorianus
aatcagagactaaatgcagccgcca

SEQ ID NO: 183064 - DNA, 25 bp, Saccharomyces pastorianus
atggcaagctggtggtgcgtccaac

SEQ ID NO: 183065 - DNA, 25 bp, Saccharomyces pastorianus
catgtgatgtttggtggaattactc

SEQ ID NO: 183066 - DNA, 25 bp, Saccharomyces pastorianus
tggcacccgtacacatcaataagta

SEQ ID NO: 183067 - DNA, 25 bp, Saccharomyces pastorianus
ggtggtgcgtccaacaacgatacaa

SEQ ID NO: 183068 - DNA, 25 bp, Saccharomyces pastorianus
atctattacattatgggtggtatgt

SEQ ID NO: 183069 - DNA, 25 bp, Saccharomyces pastorianus
ctattacattatgggtggtatgttg

SEQ ID NO: 183070 - DNA, 25 bp, Saccharomyces pastorianus
cattatgggtggtatgttggaataa

SEQ ID NO: 183071 - DNA, 25 bp, Saccharomyces pastorianus
tctattacattatgggtggtatgtt

SEQ ID NO: 183072 - DNA, 25 bp, Saccharomyces pastorianus
cattagatctattacattatgggtg

SEQ ID NO: 183073 - DNA, 25 bp, Saccharomyces pastorianus
ttagatctattacattatgggtggt

SEQ ID NO: 183074 - DNA, 25 bp, Saccharomyces pastorianus
attatgggtggtatgttggaataaa

SEQ ID NO: 183075 - DNA, 25 bp, Saccharomyces pastorianus
tcattagatctattacattatgggt

SEQ ID NO: 183076 - DNA, 25 bp, Saccharomyces pastorianus
gatctattacattatgggtggtatg

SEQ ID NO: 183077 - DNA, 25 bp, Saccharomyces pastorianus
ttcattagatctattacattatggg

SEQ ID NO: 183078 - DNA, 25 bp, Saccharomyces pastorianus
attagatctattacattatgggtgg

SEQ ID NO: 183079 - DNA, 25 bp, Saccharomyces pastorianus
gcccatccacgattactttacaagg

SEQ ID NO: 183080 - DNA, 25 bp, Saccharomyces pastorianus
tatcttggtgtaactcttcgcctga

SEQ ID NO: 183081 - DNA, 25 bp, Saccharomyces pastorianus
taatggcagttctactatcttggtg

SEQ ID NO: 183082 - DNA, 25 bp, Saccharomyces pastorianus
aaggtcaacctcagtatcgctatca

SEQ ID NO: 183083 - DNA, 25 bp, Saccharomyces pastorianus
atatcagatcccaacagccttcgat

SEQ ID NO: 183084 - DNA, 25 bp, Saccharomyces pastorianus
aatgagctgggcaacctctacgaga

SEQ ID NO: 183085 - DNA, 25 bp, Saccharomyces pastorianus
ctttcagtaacgtttattgtgccga

SEQ ID NO: 183086 - DNA, 25 bp, Saccharomyces pastorianus
aaaacggcgtcccatgcatctcata

SEQ ID NO: 183087 - DNA, 25 bp, Saccharomyces pastorianus
ttgtgccgagcttatttcatatcat

SEQ ID NO: 183088 - DNA, 25 bp, Saccharomyces pastorianus
aacgtggcccatatatcagatccca

SEQ ID NO: 183089 - DNA, 25 bp, Saccharomyces pastorianus
tatgtgcatccgattttctttgccc

SEQ ID NO: 183090 - DNA, 25 bp, Saccharomyces pastorianus
gcactgaggtttttctcaaccgtta

SEQ ID NO: 183091 - DNA, 25 bp, Saccharomyces pastorianus
gacgacgcttctgcactgaggtttt

SEQ ID NO: 183092 - DNA, 25 bp, Saccharomyces pastorianus
tcaagttactggacgacgcttctgc

SEQ ID NO: 183093 - DNA, 25 bp, Saccharomyces pastorianus
ctgaggtttttctcaaccgttagct

SEQ ID NO: 183094 - DNA, 25 bp, Saccharomyces pastorianus
ggtttttctcaaccgttagcttgag

SEQ ID NO: 183095 - DNA, 25 bp, Saccharomyces pastorianus
catcaagttactggacgacgcttct

SEQ ID NO: 183096 - DNA, 25 bp, Saccharomyces pastorianus
ctgcactgaggtttttctcaaccgt

SEQ ID NO: 183097 - DNA, 25 bp, Saccharomyces pastorianus
gcttctgcactgaggtttttctcaa

SEQ ID NO: 183098 - DNA, 25 bp, Saccharomyces pastorianus
gacgcttctgcactgaggtttttct

SEQ ID NO: 183099 - DNA, 25 bp, Saccharomyces pastorianus
tttctcaaccgttagcttgaggtgg

SEQ ID NO: 183100 - DNA, 25 bp, Saccharomyces pastorianus
gaggtttttctcaaccgttagcttg

SEQ ID NO: 183101 - DNA, 25 bp, Saccharomyces pastorianus
gtaggtggcagaggaaccggcatcg

SEQ ID NO: 183102 - DNA, 25 bp, Saccharomyces pastorianus
accggcatcggcagtttcaaaggtg

SEQ ID NO: 183103 - DNA, 25 bp, Saccharomyces pastorianus
taggtggcagaggaaccggcatcgg

SEQ ID NO: 183104 - DNA, 25 bp, Saccharomyces pastorianus
taatgacaacgaaaccaccctttct

SEQ ID NO: 183105 - DNA, 25 bp, Saccharomyces pastorianus
accaccctttctcaaagcagaacat

SEQ ID NO: 183106 - DNA, 25 bp, Saccharomyces pastorianus
gaaaccaccctttctcaaagcagaa

SEQ ID NO: 183107 - DNA, 25 bp, Saccharomyces pastorianus
aggaaccggcatcggcagtttcaaa

SEQ ID NO: 183108 - DNA, 25 bp, Saccharomyces pastorianus
ggtaggtggcagaggaaccggcatc

SEQ ID NO: 183109 - DNA, 25 bp, Saccharomyces pastorianus
agaggaaccggcatcggcagtttca

SEQ ID NO: 183110 - DNA, 25 bp, Saccharomyces pastorianus
cagaggaaccggcatcggcagtttc

SEQ ID NO: 183111 - DNA, 25 bp, Saccharomyces pastorianus
gtgaccatgcttaccggtcttggaa

SEQ ID NO: 183112 - DNA, 25 bp, Saccharomyces pastorianus
tcacataaaaaaaccggcataccaa

SEQ ID NO: 183113 - DNA, 25 bp, Saccharomyces pastorianus
aaagtggaaggtaagcgtatagcaa

SEQ ID NO: 183114 - DNA, 25 bp, Saccharomyces pastorianus
gaacaagacctctaaatcacataaa

SEQ ID NO: 183115 - DNA, 25 bp, Saccharomyces pastorianus
atcaagaacaagacctctaaatcac

SEQ ID NO: 183116 - DNA, 25 bp, Saccharomyces pastorianus
gttgttttaatattattcgtccact

SEQ ID NO: 183117 - DNA, 25 bp, Saccharomyces pastorianus
atccaagttgttttaatattattcg

SEQ ID NO: 183118 - DNA, 25 bp, Saccharomyces pastorianus
aggtaagcgtatagcaaaactgata

SEQ ID NO: 183119 - DNA, 25 bp, Saccharomyces pastorianus
acaagacctctaaatcacataaaaa

SEQ ID NO: 183120 - DNA, 25 bp, Saccharomyces pastorianus
tgttttaatattattcgtccactaa

SEQ ID NO: 183121 - DNA, 25 bp, Saccharomyces pastorianus
gcgtatagcaaaactgataaatcca

SEQ ID NO: 183122 - DNA, 25 bp, Saccharomyces pastorianus
agcaaaactgataaatccaagttgt

SEQ ID NO: 183123 - DNA, 25 bp, Saccharomyces pastorianus
ggaggtttcttgttatggttacagc

SEQ ID NO: 183124 - DNA, 25 bp, Saccharomyces pastorianus
gagacatgctatgacaggctgttat

SEQ ID NO: 183125 - DNA, 25 bp, Saccharomyces pastorianus
aaaaagaattctgctcctggagttg

SEQ ID NO: 183126 - DNA, 25 bp, Saccharomyces pastorianus
ggtcagactattccacactgttaca

SEQ ID NO: 183127 - DNA, 25 bp, Saccharomyces pastorianus
caggctgttatttgttttcccacga

SEQ ID NO: 183128 - DNA, 25 bp, Saccharomyces pastorianus
ataagccacccgtttcagaaagcag

SEQ ID NO: 183129 - DNA, 25 bp, Saccharomyces pastorianus
tagattacactctcatgaccataag

SEQ ID NO: 183130 - DNA, 25 bp, Saccharomyces pastorianus
attcgacggtgatgctaatgatgac

SEQ ID NO: 183131 - DNA, 25 bp, Saccharomyces pastorianus
tttcccacgaagtcaagttgccagc

SEQ ID NO: 183132 - DNA, 25 bp, Saccharomyces pastorianus
gaacgggtcatagctttggacacaa

SEQ ID NO: 183133 - DNA, 25 bp, Saccharomyces pastorianus
agcgtatttcctataaacctgcaag

SEQ ID NO: 183134 - DNA, 25 bp, Saccharomyces pastorianus
cagagcagcattcacatatttgatt

SEQ ID NO: 183135 - DNA, 25 bp, Saccharomyces pastorianus
acgatgctgaactttcaaaggtgtt

SEQ ID NO: 183136 - DNA, 25 bp, Saccharomyces pastorianus
caaaggtgttgaaaactcgctactt

SEQ ID NO: 183137 - DNA, 25 bp, Saccharomyces pastorianus
atttgattaacgatgctgaactttc

SEQ ID NO: 183138 - DNA, 25 bp, Saccharomyces pastorianus
taggttttgaaaccggcaggatcaa

SEQ ID NO: 183139 - DNA, 25 bp, Saccharomyces pastorianus
gagcagcattcacatatttgattaa

SEQ ID NO: 183140 - DNA, 25 bp, Saccharomyces pastorianus
aaaccggcaggatcaagaagtggga

SEQ ID NO: 183141 - DNA, 25 bp, Saccharomyces pastorianus
tgaaaactcgctacttattaaaggt

SEQ ID NO: 183142 - DNA, 25 bp, Saccharomyces pastorianus
ggagattagacctgccaaaccacta

SEQ ID NO: 183143 - DNA, 25 bp, Saccharomyces pastorianus
gggtgttttacaggagattagacct

SEQ ID NO: 183144 - DNA, 25 bp, Saccharomyces pastorianus
ggtgttgaaaactcgctacttatta

SEQ ID NO: 183145 - DNA, 25 bp, Saccharomyces pastorianus
gaattgaaaacttctcttccccacg

SEQ ID NO: 183146 - DNA, 25 bp, Saccharomyces pastorianus
gagagacctcgaatctcaagtacaa

SEQ ID NO: 183147 - DNA, 25 bp, Saccharomyces pastorianus
gcagaggaacgatttaaactacttt

SEQ ID NO: 183148 - DNA, 25 bp, Saccharomyces pastorianus
ctcgtatctcgcaaattactaggga

SEQ ID NO: 183149 - DNA, 25 bp, Saccharomyces pastorianus
aagacttgcaaactcgtatctcgca

SEQ ID NO: 183150 - DNA, 25 bp, Saccharomyces pastorianus
tactttcgaatacgttagatctaac

SEQ ID NO: 183151 - DNA, 25 bp, Saccharomyces pastorianus
acagcaagagcgacatatccattaa

SEQ ID NO: 183152 - DNA, 25 bp, Saccharomyces pastorianus
ttccccacgaagatgcgtcatacag

SEQ ID NO: 183153 - DNA, 25 bp, Saccharomyces pastorianus
atacaggacctgtatgacagcaaga

SEQ ID NO: 183154 - DNA, 25 bp, Saccharomyces pastorianus
agctgagaacgaccaactgcgcaaa

SEQ ID NO: 183155 - DNA, 25 bp, Saccharomyces pastorianus
gatgcgtcatacagcaatgtaacta

SEQ ID NO: 183156 - DNA, 25 bp, Saccharomyces pastorianus
tcgtattctttgtcactgtccatgg

SEQ ID NO: 183157 - DNA, 25 bp, Saccharomyces pastorianus
tctacttcccagttagcctctgcat

SEQ ID NO: 183158 - DNA, 25 bp, Saccharomyces pastorianus
gtcactgtccatggtgacccattca

SEQ ID NO: 183159 - DNA, 25 bp, Saccharomyces pastorianus
agctttatccttttcttcgtcacta

SEQ ID NO: 183160 - DNA, 25 bp, Saccharomyces pastorianus
atggtgacccattcaccatcgactt

SEQ ID NO: 183161 - DNA, 25 bp, Saccharomyces pastorianus
atttctttttcgtcagctttatcct

SEQ ID NO: 183162 - DNA, 25 bp, Saccharomyces pastorianus
tttatcttcatcgtcgccgcttagt

SEQ ID NO: 183163 - DNA, 25 bp, Saccharomyces pastorianus
atcttccatattgacctcgtattct

SEQ ID NO: 183164 - DNA, 25 bp, Saccharomyces pastorianus
caagtcggaatctatttctttttcg

SEQ ID NO: 183165 - DNA, 25 bp, Saccharomyces pastorianus
gtcgccgcttagttccaagtcggaa

SEQ ID NO: 183166 - DNA, 25 bp, Saccharomyces pastorianus
ttttcttcgtcactatcttccatat

SEQ ID NO: 183167 - DNA, 25 bp, Saccharomyces pastorianus
gatctggccagataaaacaattcaa

SEQ ID NO: 183168 - DNA, 25 bp, Saccharomyces pastorianus
gaaaatccattctacctgtaaagtt

SEQ ID NO: 183169 - DNA, 25 bp, Saccharomyces pastorianus
acgttggttatccaccgacttgaga

SEQ ID NO: 183170 - DNA, 25 bp, Saccharomyces pastorianus
agaacatgctaagggatccatccga

SEQ ID NO: 183171 - DNA, 25 bp, Saccharomyces pastorianus
tggttatccaccgacttgagagacg

SEQ ID NO: 183172 - DNA, 25 bp, Saccharomyces pastorianus
gagacggtaaccaagctttgccaga

SEQ ID NO: 183173 - DNA, 25 bp, Saccharomyces pastorianus
gatgaccaaaaggatctggccagat

SEQ ID NO: 183174 - DNA, 25 bp, Saccharomyces pastorianus
ggagtatttccataaactgatcaat

SEQ ID NO: 183175 - DNA, 25 bp, Saccharomyces pastorianus
aaatataaggcattcgtcccaccaa

SEQ ID NO: 183176 - DNA, 25 bp, Saccharomyces pastorianus
attcgtcccaccaaagatgaccaaa

SEQ ID NO: 183177 - DNA, 25 bp, Saccharomyces pastorianus
aagctttgccagacccaatgtctgt

SEQ ID NO: 183178 - DNA, 25 bp, Saccharomyces pastorianus
tcgggttgacctccatgaggaccat

SEQ ID NO: 183179 - DNA, 25 bp, Saccharomyces pastorianus
aattgatgcgatttgccgggtacta

SEQ ID NO: 183180 - DNA, 25 bp, Saccharomyces pastorianus
gggtactacccagctatgaggagat

SEQ ID NO: 183181 - DNA, 25 bp, Saccharomyces pastorianus
ttacggctcgtctaatgaatggaat

SEQ ID NO: 183182 - DNA, 25 bp, Saccharomyces pastorianus
aagtatttcactactgcttggagta

SEQ ID NO: 183183 - DNA, 25 bp, Saccharomyces pastorianus
aagggagcccagtgtatgcaagaaa

SEQ ID NO: 183184 - DNA, 25 bp, Saccharomyces pastorianus
gtgaagggccctcctagtactagag

SEQ ID NO: 183185 - DNA, 25 bp, Saccharomyces pastorianus
tattcgcgacttggaggcatgcttc

SEQ ID NO: 183186 - DNA, 25 bp, Saccharomyces pastorianus
gagtaaacccactttgcgatgtcaa

SEQ ID NO: 183187 - DNA, 25 bp, Saccharomyces pastorianus
gaggaccatgtttcacttacactgt

SEQ ID NO: 183188 - DNA, 25 bp, Saccharomyces pastorianus
tagaacagttgccttcgggttgacc

SEQ ID NO: 183189 - DNA, 25 bp, Saccharomyces pastorianus
aaccattctttctcaaggcagaaca

SEQ ID NO: 183190 - DNA, 25 bp, Saccharomyces pastorianus
cattctttctcaaggcagaacattg

SEQ ID NO: 183191 - DNA, 25 bp, Saccharomyces pastorianus
aacgaaaccattctttctcaaggca

SEQ ID NO: 183192 - DNA, 25 bp, Saccharomyces pastorianus
ggaggcaccagcgtcagcattttca

SEQ ID NO: 183193 - DNA, 25 bp, Saccharomyces pastorianus
ccagcgtcagcattttcaaaggtgt

SEQ ID NO: 183194 - DNA, 25 bp, Saccharomyces pastorianus
aggcaccagcgtcagcattttcaaa

SEQ ID NO: 183195 - DNA, 25 bp, Saccharomyces pastorianus
ggcggaggcaccagcgtcagcattt

SEQ ID NO: 183196 - DNA, 25 bp, Saccharomyces pastorianus
cattgggtaggtggcggaggcacca

SEQ ID NO: 183197 - DNA, 25 bp, Saccharomyces pastorianus
gcaccagcgtcagcattttcaaagg

SEQ ID NO: 183198 - DNA, 25 bp, Saccharomyces pastorianus
gaaaccattctttctcaaggcagaa

SEQ ID NO: 183199 - DNA, 25 bp, Saccharomyces pastorianus
gcgtcagcattttcaaaggtgtgtt

SEQ ID NO: 183200 - DNA, 25 bp, Saccharomyces pastorianus
tggacaggccgccaacttatttggg

SEQ ID NO: 183201 - DNA, 25 bp, Saccharomyces pastorianus
gatgatgatgcacctcagaatcccc

SEQ ID NO: 183202 - DNA, 25 bp, Saccharomyces pastorianus
acctcgatgaggatgactctgatga

SEQ ID NO: 183203 - DNA, 25 bp, Saccharomyces pastorianus
actttccaatggtttcttgtttgca

SEQ ID NO: 183204 - DNA, 25 bp, Saccharomyces pastorianus
ttaggaacactctacaaccgcaggg

SEQ ID NO: 183205 - DNA, 25 bp, Saccharomyces pastorianus
ggccaagaagaatacctccaacaga

SEQ ID NO: 183206 - DNA, 25 bp, Saccharomyces pastorianus
ggacctcaatttgatggagctacta

SEQ ID NO: 183207 - DNA, 25 bp, Saccharomyces pastorianus
gtggcggagtacgtgattttttcca

SEQ ID NO: 183208 - DNA, 25 bp, Saccharomyces pastorianus
cgaatttcgagtgactatactttcc

SEQ ID NO: 183209 - DNA, 25 bp, Saccharomyces pastorianus
caatattgcagttcttaggacctca

SEQ ID NO: 183210 - DNA, 25 bp, Saccharomyces pastorianus
gatgaaactggacaggccgccaact

SEQ ID NO: 183211 - DNA, 25 bp, Saccharomyces pastorianus
cagccgcagaaagtattgcagcagt

SEQ ID NO: 183212 - DNA, 25 bp, Saccharomyces pastorianus
actaatgccactaccctgaaagtac

SEQ ID NO: 183213 - DNA, 25 bp, Saccharomyces pastorianus
acagccgcagaaagtattgcagcag

SEQ ID NO: 183214 - DNA, 25 bp, Saccharomyces pastorianus
gacagccgcagaaagtattgcagca

SEQ ID NO: 183215 - DNA, 25 bp, Saccharomyces pastorianus
tgccactaccctgaaagtaccaacg

SEQ ID NO: 183216 - DNA, 25 bp, Saccharomyces pastorianus
ctaatgccagtaccaatgcgactac

SEQ ID NO: 183217 - DNA, 25 bp, Saccharomyces pastorianus
ctaatgccactaccctgaaagtacc

SEQ ID NO: 183218 - DNA, 25 bp, Saccharomyces pastorianus
agccgcagaaagtattgcagcagtg

SEQ ID NO: 183219 - DNA, 25 bp, Saccharomyces pastorianus
actaccctgaaagtaccaacgctag

SEQ ID NO: 183220 - DNA, 25 bp, Saccharomyces pastorianus
atgccactaccctgaaagtaccaac

SEQ ID NO: 183221 - DNA, 25 bp, Saccharomyces pastorianus
tgctaatgccagtaccaatgcgact

SEQ ID NO: 183222 - DNA, 25 bp, Saccharomyces pastorianus
tgcaagttaatgaaagatggctgag

SEQ ID NO: 183223 - DNA, 25 bp, Saccharomyces pastorianus
ttctccagtgaagaagttgctgaac

SEQ ID NO: 183224 - DNA, 25 bp, Saccharomyces pastorianus
atcaagaggtttggccttcgttact

SEQ ID NO: 183225 - DNA, 25 bp, Saccharomyces pastorianus
ggccttcgttactttctccagtgaa

SEQ ID NO: 183226 - DNA, 25 bp, Saccharomyces pastorianus
gaaatattgtttccattcgctccta

SEQ ID NO: 183227 - DNA, 25 bp, Saccharomyces pastorianus
gaaatcaagaggtttggccttcgtt

SEQ ID NO: 183228 - DNA, 25 bp, Saccharomyces pastorianus
gatggctgagtgaaaatagtttgag

SEQ ID NO: 183229 - DNA, 25 bp, Saccharomyces pastorianus
atattgtttccattcgctcctattc

SEQ ID NO: 183230 - DNA, 25 bp, Saccharomyces pastorianus
ttccattcgctcctattccaagagt

SEQ ID NO: 183231 - DNA, 25 bp, Saccharomyces pastorianus
ttcgttactttctccagtgaagaag

SEQ ID NO: 183232 - DNA, 25 bp, Saccharomyces pastorianus
ggatggtagaggttacatgaactta

SEQ ID NO: 183233 - DNA, 25 bp, Saccharomyces pastorianus
tatacaacattatgatccgatatag

SEQ ID NO: 183234 - DNA, 25 bp, Saccharomyces pastorianus
caacattatgatccgatatagtgta

SEQ ID NO: 183235 - DNA, 25 bp, Saccharomyces pastorianus
atgatccgatatagtgtaacggcta

SEQ ID NO: 183236 - DNA, 25 bp, Saccharomyces pastorianus
aacattatgatccgatatagtgtaa

SEQ ID NO: 183237 - DNA, 25 bp, Saccharomyces pastorianus
ttatacaacattatgatccgatata

SEQ ID NO: 183238 - DNA, 25 bp, Saccharomyces pastorianus
attatgatccgatatagtgtaacgg

SEQ ID NO: 183239 - DNA, 25 bp, Saccharomyces pastorianus
acaacattatgatccgatatagtgt

SEQ ID NO: 183240 - DNA, 25 bp, Saccharomyces pastorianus
atacaacattatgatccgatatagt

SEQ ID NO: 183241 - DNA, 25 bp, Saccharomyces pastorianus
cattatgatccgatatagtgtaacg

SEQ ID NO: 183242 - DNA, 25 bp, Saccharomyces pastorianus
acattatgatccgatatagtgtaac

SEQ ID NO: 183243 - DNA, 25 bp, Saccharomyces pastorianus
tacaacattatgatccgatatagtg

SEQ ID NO: 183244 - DNA, 25 bp, Saccharomyces pastorianus
cattaagttcgatgactgtgtccca

SEQ ID NO: 183245 - DNA, 25 bp, Saccharomyces pastorianus
ccattaagttcgatgactgtgtccc

SEQ ID NO: 183246 - DNA, 25 bp, Saccharomyces pastorianus
tccattaagttcgatgactgtgtcc

SEQ ID NO: 183247 - DNA, 25 bp, Saccharomyces pastorianus
taagttcgatgactgtgtcccaatc

SEQ ID NO: 183248 - DNA, 25 bp, Saccharomyces pastorianus
cttccattaagttcgatgactgtgt

SEQ ID NO: 183249 - DNA, 25 bp, Saccharomyces pastorianus
gttcgatgactgtgtcccaatccta

SEQ ID NO: 183250 - DNA, 25 bp, Saccharomyces pastorianus
ttaagttcgatgactgtgtcccaat

SEQ ID NO: 183251 - DNA, 25 bp, Saccharomyces pastorianus
aagttcgatgactgtgtcccaatcc

SEQ ID NO: 183252 - DNA, 25 bp, Saccharomyces pastorianus
attaagttcgatgactgtgtcccaa

SEQ ID NO: 183253 - DNA, 25 bp, Saccharomyces pastorianus
gcttccattaagttcgatgactgtg

SEQ ID NO: 183254 - DNA, 25 bp, Saccharomyces pastorianus
agttcgatgactgtgtcccaatcct

SEQ ID NO: 183255 - DNA, 25 bp, Saccharomyces pastorianus
gtagttatatagcagggacccacgg

SEQ ID NO: 183256 - DNA, 25 bp, Saccharomyces pastorianus
agatttcttgtctcttccattagga

SEQ ID NO: 183257 - DNA, 25 bp, Saccharomyces pastorianus
gagggtagccgcaaagatttcttgt

SEQ ID NO: 183258 - DNA, 25 bp, Saccharomyces pastorianus
gacatagctatctttttcttttctg

SEQ ID NO: 183259 - DNA, 25 bp, Saccharomyces pastorianus
gagcgccttctttcacagggacttt

SEQ ID NO: 183260 - DNA, 25 bp, Saccharomyces pastorianus
aaaacaattgccgtccgcgtcgcag

SEQ ID NO: 183261 - DNA, 25 bp, Saccharomyces pastorianus
aaagaagcatttcgcggctacggag

SEQ ID NO: 183262 - DNA, 25 bp, Saccharomyces pastorianus
agccgtgcgcttcagggacagaaaa

SEQ ID NO: 183263 - DNA, 25 bp, Saccharomyces pastorianus
gacccacggaagagagcgagcgcct

SEQ ID NO: 183264 - DNA, 25 bp, Saccharomyces pastorianus
gtgcactaactctctcgagggtagc

SEQ ID NO: 183265 - DNA, 25 bp, Saccharomyces pastorianus
acagggacttttgtcagccacgtct

SEQ ID NO: 183266 - DNA, 25 bp, Saccharomyces pastorianus
gctttcattagaattgatgactgtt

SEQ ID NO: 183267 - DNA, 25 bp, Saccharomyces pastorianus
ttctccttccgttctatatttttca

SEQ ID NO: 183268 - DNA, 25 bp, Saccharomyces pastorianus
ttgcatttctgctttcattagaatt

SEQ ID NO: 183269 - DNA, 25 bp, Saccharomyces pastorianus
gttctatatttttcattaccctatt

SEQ ID NO: 183270 - DNA, 25 bp, Saccharomyces pastorianus
cttgcatttctgctttcattagaat

SEQ ID NO: 183271 - DNA, 25 bp, Saccharomyces pastorianus
tatttttcattaccctattacattg

SEQ ID NO: 183272 - DNA, 25 bp, Saccharomyces pastorianus
tccgttctatatttttcattaccct

SEQ ID NO: 183273 - DNA, 25 bp, Saccharomyces pastorianus
ctatatttttcattaccctattaca

SEQ ID NO: 183274 - DNA, 25 bp, Saccharomyces pastorianus
tgcatttctgctttcattagaattg

SEQ ID NO: 183275 - DNA, 25 bp, Saccharomyces pastorianus
ttctgctttcattagaattgatgac

SEQ ID NO: 183276 - DNA, 25 bp, Saccharomyces pastorianus
ttttcattaccctattacattgtca

SEQ ID NO: 183277 - DNA, 25 bp, Saccharomyces pastorianus
atagcaagctttagttcgggtccct

SEQ ID NO: 183278 - DNA, 25 bp, Saccharomyces pastorianus
aaattcaactttgtccacgtcttca

SEQ ID NO: 183279 - DNA, 25 bp, Saccharomyces pastorianus
gagagattctgcagtcaccatggat

SEQ ID NO: 183280 - DNA, 25 bp, Saccharomyces pastorianus
agccaggtctctatttctacaagtg

SEQ ID NO: 183281 - DNA, 25 bp, Saccharomyces pastorianus
gtattcaaatacgaccctttcttct

SEQ ID NO: 183282 - DNA, 25 bp, Saccharomyces pastorianus
aaattatgcctccacaactgttctt

SEQ ID NO: 183283 - DNA, 25 bp, Saccharomyces pastorianus
ggctaatttcggttctgctactaat

SEQ ID NO: 183284 - DNA, 25 bp, Saccharomyces pastorianus
acaaacttcatctaatacgccttca

SEQ ID NO: 183285 - DNA, 25 bp, Saccharomyces pastorianus
tgcagcggcttcttcaaattcaact

SEQ ID NO: 183286 - DNA, 25 bp, Saccharomyces pastorianus
gcggtctatacttgcgtgttactta

SEQ ID NO: 183287 - DNA, 25 bp, Saccharomyces pastorianus
cggttcttccatttctaacacgatt

SEQ ID NO: 183288 - DNA, 25 bp, Saccharomyces pastorianus
tgaacagattagtcagctatactct

SEQ ID NO: 183289 - DNA, 25 bp, Saccharomyces pastorianus
gcttataaaacagcccaaactttgg

SEQ ID NO: 183290 - DNA, 25 bp, Saccharomyces pastorianus
gaagacgagaacattcaactgatta

SEQ ID NO: 183291 - DNA, 25 bp, Saccharomyces pastorianus
atcatctaacctatcttctctaatc

SEQ ID NO: 183292 - DNA, 25 bp, Saccharomyces pastorianus
aaatggactaaccaggtgaccgagt

SEQ ID NO: 183293 - DNA, 25 bp, Saccharomyces pastorianus
gaaaacggaagctctcctgtctgat

SEQ ID NO: 183294 - DNA, 25 bp, Saccharomyces pastorianus
gggctgctgccaataacaatgacca

SEQ ID NO: 183295 - DNA, 25 bp, Saccharomyces pastorianus
actaaagccagtttctcttgacaat

SEQ ID NO: 183296 - DNA, 25 bp, Saccharomyces pastorianus
gctatactctgatgctgtgatggca

SEQ ID NO: 183297 - DNA, 25 bp, Saccharomyces pastorianus
gaccgagtcagcctctcattttgaa

SEQ ID NO: 183298 - DNA, 25 bp, Saccharomyces pastorianus
gatctcttgacgatagctcatcttc

SEQ ID NO: 183299 - DNA, 25 bp, Saccharomyces pastorianus
gaatatggttcctttgcaacctatg

SEQ ID NO: 183300 - DNA, 25 bp, Saccharomyces pastorianus
tgaacctacaaaacatcggatcttt

SEQ ID NO: 183301 - DNA, 25 bp, Saccharomyces pastorianus
aatcgctagtcgttcaaaccgcatg

SEQ ID NO: 183302 - DNA, 25 bp, Saccharomyces pastorianus
aatcaaggccccactagcaatggaa

SEQ ID NO: 183303 - DNA, 25 bp, Saccharomyces pastorianus
gctaattgcacttcttttcgctgaa

SEQ ID NO: 183304 - DNA, 25 bp, Saccharomyces pastorianus
gcattggaggcattacacaccgtgg

SEQ ID NO: 183305 - DNA, 25 bp, Saccharomyces pastorianus
aaaggttgcgacttcttggtcagta

SEQ ID NO: 183306 - DNA, 25 bp, Saccharomyces pastorianus
aatgtactgattcatccgttctggg

SEQ ID NO: 183307 - DNA, 25 bp, Saccharomyces pastorianus
tacacgcatcagaatcgccatcgaa

SEQ ID NO: 183308 - DNA, 25 bp, Saccharomyces pastorianus
gcaatggaaaccttgaatcctgctg

SEQ ID NO: 183309 - DNA, 25 bp, Saccharomyces pastorianus
catcgaccgcggtattgacctttta

SEQ ID NO: 183310 - DNA, 25 bp, Saccharomyces pastorianus
agaggctttggaggtttactttgca

SEQ ID NO: 183311 - DNA, 25 bp, Saccharomyces pastorianus
gtagcaaacctcaactcatacatgt

SEQ ID NO: 183312 - DNA, 25 bp, Saccharomyces pastorianus
gtgccatacatcgaagaggctttgg

SEQ ID NO: 183313 - DNA, 25 bp, Saccharomyces pastorianus
cattctaattccgtcctctctaaaa

SEQ ID NO: 183314 - DNA, 25 bp, Saccharomyces pastorianus
taaggagtcagtgccatacatcgaa

SEQ ID NO: 183315 - DNA, 25 bp, Saccharomyces pastorianus
aaagtgctccaggtactgacaccga

SEQ ID NO: 183316 - DNA, 25 bp, Saccharomyces pastorianus
atatactcggttttgcaaagaaatg

SEQ ID NO: 183317 - DNA, 25 bp, Saccharomyces pastorianus
gactatgcattctaattccgtcctc

SEQ ID NO: 183318 - DNA, 25 bp, Saccharomyces pastorianus
ttttttgatggtcagcgttgcaaac

SEQ ID NO: 183319 - DNA, 25 bp, Saccharomyces pastorianus
ggtcagcgttgcaaacaatcattta

SEQ ID NO: 183320 - DNA, 25 bp, Saccharomyces pastorianus
ctgacaccgaagactgggagtttat

SEQ ID NO: 183321 - DNA, 25 bp, Saccharomyces pastorianus
agatgatatcatcctctcactaacg

SEQ ID NO: 183322 - DNA, 25 bp, Saccharomyces pastorianus
aaaattgctttttacctgatggcta

SEQ ID NO: 183323 - DNA, 25 bp, Saccharomyces pastorianus
aaggttactctgtgaaacttccata

SEQ ID NO: 183324 - DNA, 25 bp, Saccharomyces pastorianus
aacaatatggtctttcttcgccgca

SEQ ID NO: 183325 - DNA, 25 bp, Saccharomyces pastorianus
tggctacttgacgaaggaacttctt

SEQ ID NO: 183326 - DNA, 25 bp, Saccharomyces pastorianus
gaatgctaacgaacgaacgccacca

SEQ ID NO: 183327 - DNA, 25 bp, Saccharomyces pastorianus
atcatcctctcactaacgaatgcta

SEQ ID NO: 183328 - DNA, 25 bp, Saccharomyces pastorianus
aaaccactttaagcctgctatacga

SEQ ID NO: 183329 - DNA, 25 bp, Saccharomyces pastorianus
ttcgccgcaactacaagcacttgta

SEQ ID NO: 183330 - DNA, 25 bp, Saccharomyces pastorianus
tttacctgatggctacttgacgaag

SEQ ID NO: 183331 - DNA, 25 bp, Saccharomyces pastorianus
gtgtacatcgtcgaaaattgctttt

SEQ ID NO: 183332 - DNA, 25 bp, Saccharomyces pastorianus
gtcaatgcacaatcgtcgtggagtt

SEQ ID NO: 183333 - DNA, 25 bp, Saccharomyces pastorianus
cacaatcgtcgtggagtttcccaac

SEQ ID NO: 183334 - DNA, 25 bp, Saccharomyces pastorianus
atgcacaatcgtcgtggagtttccc

SEQ ID NO: 183335 - DNA, 25 bp, Saccharomyces pastorianus
gcacaatcgtcgtggagtttcccaa

SEQ ID NO: 183336 - DNA, 25 bp, Saccharomyces pastorianus
cagtcaatgcacaatcgtcgtggag

SEQ ID NO: 183337 - DNA, 25 bp, Saccharomyces pastorianus
gtcagtcaatgcacaatcgtcgtgg

SEQ ID NO: 183338 - DNA, 25 bp, Saccharomyces pastorianus
tcgtcgtggagtttcccaacccaag

SEQ ID NO: 183339 - DNA, 25 bp, Saccharomyces pastorianus
caatgcacaatcgtcgtggagtttc

SEQ ID NO: 183340 - DNA, 25 bp, Saccharomyces pastorianus
gagtcagtcaatgcacaatcgtcgt

SEQ ID NO: 183341 - DNA, 25 bp, Saccharomyces pastorianus
aggaagagtcagtcaatgcacaatc

SEQ ID NO: 183342 - DNA, 25 bp, Saccharomyces pastorianus
gaagagtcagtcaatgcacaatcgt

SEQ ID NO: 183343 - DNA, 25 bp, Saccharomyces pastorianus
atttctatatactaatattacgatt

SEQ ID NO: 183344 - DNA, 25 bp, Saccharomyces pastorianus
atatttctatatactaatattacga

SEQ ID NO: 183345 - DNA, 25 bp, Saccharomyces pastorianus
tatttctatatactaatattacgat

SEQ ID NO: 183346 - DNA, 25 bp, Saccharomyces pastorianus
gaatctatatttctatatactaata

SEQ ID NO: 183347 - DNA, 25 bp, Saccharomyces pastorianus
ttctatatactaatattacgattat

SEQ ID NO: 183348 - DNA, 25 bp, Saccharomyces pastorianus
tggaatctatatttctatatactaa

SEQ ID NO: 183349 - DNA, 25 bp, Saccharomyces pastorianus
atggaatctatatttctatatacta

SEQ ID NO: 183350 - DNA, 25 bp, Saccharomyces pastorianus
aatggaatctatatttctatatact

SEQ ID NO: 183351 - DNA, 25 bp, Saccharomyces pastorianus
ctatatactaatattacgattattc

SEQ ID NO: 183352 - DNA, 25 bp, Saccharomyces pastorianus
ggaatctatatttctatatactaat

SEQ ID NO: 183353 - DNA, 25 bp, Saccharomyces pastorianus
tttctatatactaatattacgatta

SEQ ID NO: 183354 - DNA, 25 bp, Saccharomyces pastorianus
tgatattgccaacctcattttgcgt

SEQ ID NO: 183355 - DNA, 25 bp, Saccharomyces pastorianus
ggaaaactttttaatcgcgagtatg

SEQ ID NO: 183356 - DNA, 25 bp, Saccharomyces pastorianus
aactgcttttatatgcctacagtgg

SEQ ID NO: 183357 - DNA, 25 bp, Saccharomyces pastorianus
tgcctacagtggttgatattgccaa

SEQ ID NO: 183358 - DNA, 25 bp, Saccharomyces pastorianus
aaaataaagtcgctgttgcaattga

SEQ ID NO: 183359 - DNA, 25 bp, Saccharomyces pastorianus
ttgaacaactgcttttatatgccta

SEQ ID NO: 183360 - DNA, 25 bp, Saccharomyces pastorianus
ctttgcatgcaaggctcagtttgat

SEQ ID NO: 183361 - DNA, 25 bp, Saccharomyces pastorianus
cgcggcttttactttgcatgcaagg

SEQ ID NO: 183362 - DNA, 25 bp, Saccharomyces pastorianus
ctttttaatcgcgagtatgtccgcg

SEQ ID NO: 183363 - DNA, 25 bp, Saccharomyces pastorianus
ggctcagtttgataacctttgggga

SEQ ID NO: 183364 - DNA, 25 bp, Saccharomyces pastorianus
gaacaactgcttttatatgcctaca

SEQ ID NO: 183365 - DNA, 25 bp, Saccharomyces pastorianus
gaaatcttcgcacttcaatggcact

SEQ ID NO: 183366 - DNA, 25 bp, Saccharomyces pastorianus
tactctcttgaactatttgggcctt

SEQ ID NO: 183367 - DNA, 25 bp, Saccharomyces pastorianus
aacatatcgatacgtccatgaccca

SEQ ID NO: 183368 - DNA, 25 bp, Saccharomyces pastorianus
aacgtcgatattcaccagattctgt

SEQ ID NO: 183369 - DNA, 25 bp, Saccharomyces pastorianus
agcagtgttattcttatcgggttac

SEQ ID NO: 183370 - DNA, 25 bp, Saccharomyces pastorianus
gaacgttagctctgattacctgttt

SEQ ID NO: 183371 - DNA, 25 bp, Saccharomyces pastorianus
aaatcgtagtcgttgctgctgccgc

SEQ ID NO: 183372 - DNA, 25 bp, Saccharomyces pastorianus
gctgccgcggtaatcttaacatatc

SEQ ID NO: 183373 - DNA, 25 bp, Saccharomyces pastorianus
ggactcattattgctgtagccgtca

SEQ ID NO: 183374 - DNA, 25 bp, Saccharomyces pastorianus
ttaccgcttggtgtactacttgaat

SEQ ID NO: 183375 - DNA, 25 bp, Saccharomyces pastorianus
agaagaagcattctggccttaccgc

SEQ ID NO: 183376 - DNA, 25 bp, Saccharomyces pastorianus
ctccatggcccatctctcactaaat

SEQ ID NO: 183377 - DNA, 25 bp, Saccharomyces pastorianus
actccactccatggcccatctctca

SEQ ID NO: 183378 - DNA, 25 bp, Saccharomyces pastorianus
actctcacactccactccatggccc

SEQ ID NO: 183379 - DNA, 25 bp, Saccharomyces pastorianus
tctcacactccactccatggcccat

SEQ ID NO: 183380 - DNA, 25 bp, Saccharomyces pastorianus
atggcatatgcacacggatgctaca

SEQ ID NO: 183381 - DNA, 25 bp, Saccharomyces pastorianus
cactccactccatggcccatctctc

SEQ ID NO: 183382 - DNA, 25 bp, Saccharomyces pastorianus
cacactccactccatggcccatctc

SEQ ID NO: 183383 - DNA, 25 bp, Saccharomyces pastorianus
ctactctcacactccactccatggc

SEQ ID NO: 183384 - DNA, 25 bp, Saccharomyces pastorianus
ctctcacactccactccatggccca

SEQ ID NO: 183385 - DNA, 25 bp, Saccharomyces pastorianus
acactccactccatggcccatctct

SEQ ID NO: 183386 - DNA, 25 bp, Saccharomyces pastorianus
tcacactccactccatggcccatct

SEQ ID NO: 183387 - DNA, 25 bp, Saccharomyces pastorianus
aatattcccagctttctcggcctag

SEQ ID NO: 183388 - DNA, 25 bp, Saccharomyces pastorianus
gtctttggtagaccgattgtgtcag

SEQ ID NO: 183389 - DNA, 25 bp, Saccharomyces pastorianus
gaccgattgtgtcagaataaaattc

SEQ ID NO: 183390 - DNA, 25 bp, Saccharomyces pastorianus
gttctcagtctccaaagacgtggat

SEQ ID NO: 183391 - DNA, 25 bp, Saccharomyces pastorianus
gacgtggatctgtctttggtagacc

SEQ ID NO: 183392 - DNA, 25 bp, Saccharomyces pastorianus
aaattctgtcatctgttttgtactt

SEQ ID NO: 183393 - DNA, 25 bp, Saccharomyces pastorianus
gggttaaatattcccagctttctcg

SEQ ID NO: 183394 - DNA, 25 bp, Saccharomyces pastorianus
tactttctttgtgggcgacgattat

SEQ ID NO: 183395 - DNA, 25 bp, Saccharomyces pastorianus
tcggcctagctcatcagttctcagt

SEQ ID NO: 183396 - DNA, 25 bp, Saccharomyces pastorianus
tcatcagttctcagtctccaaagac

SEQ ID NO: 183397 - DNA, 25 bp, Saccharomyces pastorianus
ttttgtactttctttgtgggcgacg

SEQ ID NO: 183398 - DNA, 25 bp, Saccharomyces pastorianus
agacaaagagcctttctcaacctac

SEQ ID NO: 183399 - DNA, 25 bp, Saccharomyces pastorianus
gcaagacacgtatcgttcgccaaaa

SEQ ID NO: 183400 - DNA, 25 bp, Saccharomyces pastorianus
tgtggatatgcaaaacgacttcgtc

SEQ ID NO: 183401 - DNA, 25 bp, Saccharomyces pastorianus
taccgttctccaagaccaggtgatg

SEQ ID NO: 183402 - DNA, 25 bp, Saccharomyces pastorianus
gtgatgactccacccaggaaggtat

SEQ ID NO: 183403 - DNA, 25 bp, Saccharomyces pastorianus
aatagtcgatccaatttccaagtta

SEQ ID NO: 183404 - DNA, 25 bp, Saccharomyces pastorianus
ttcgtctcgcctttgggttcgttga

SEQ ID NO: 183405 - DNA, 25 bp, Saccharomyces pastorianus
aggaaggtatcttgtggcccgtgca

SEQ ID NO: 183406 - DNA, 25 bp, Saccharomyces pastorianus
tgtggtgaccagagactggcacccc

SEQ ID NO: 183407 - DNA, 25 bp, Saccharomyces pastorianus
ttcgttgaccgtccccaaaggtgag

SEQ ID NO: 183408 - DNA, 25 bp, Saccharomyces pastorianus
gggcagccaattggtcgaccatata

SEQ ID NO: 183409 - DNA, 25 bp, Saccharomyces pastorianus
gaattcgcatttaagtctggaagac

SEQ ID NO: 183410 - DNA, 25 bp, Saccharomyces pastorianus
ctgtgggtacacatcatgctggtga

SEQ ID NO: 183411 - DNA, 25 bp, Saccharomyces pastorianus
acgacgaattcgcacgacacatcga

SEQ ID NO: 183412 - DNA, 25 bp, Saccharomyces pastorianus
atggattttacgtctgatacgacga

SEQ ID NO: 183413 - DNA, 25 bp, Saccharomyces pastorianus
gtctgatacgacgaattcgcacgac

SEQ ID NO: 183414 - DNA, 25 bp, Saccharomyces pastorianus
tgggtacacatcatgctggtgaagc

SEQ ID NO: 183415 - DNA, 25 bp, Saccharomyces pastorianus
agacgctgtgggtacacatcatgct

SEQ ID NO: 183416 - DNA, 25 bp, Saccharomyces pastorianus
tctggaagacgctgtgggtacacat

SEQ ID NO: 183417 - DNA, 25 bp, Saccharomyces pastorianus
gcacgacacatcgaattcgcattta

SEQ ID NO: 183418 - DNA, 25 bp, Saccharomyces pastorianus
gatacgacgaattcgcacgacacat

SEQ ID NO: 183419 - DNA, 25 bp, Saccharomyces pastorianus
tcgcacgacacatcgaattcgcatt

SEQ ID NO: 183420 - DNA, 25 bp, Saccharomyces pastorianus
ttttggaaaagaccgcatgcattac

SEQ ID NO: 183421 - DNA, 25 bp, Saccharomyces pastorianus
tcctctttttgataacgtcggattt

SEQ ID NO: 183422 - DNA, 25 bp, Saccharomyces pastorianus
gggtgtttccctcagggcttctcct

SEQ ID NO: 183423 - DNA, 25 bp, Saccharomyces pastorianus
gcatgcattacagagggtgtttccc

SEQ ID NO: 183424 - DNA, 25 bp, Saccharomyces pastorianus
tcatggtaccatgcaatttttggaa

SEQ ID NO: 183425 - DNA, 25 bp, Saccharomyces pastorianus
gagatcctctttttgataacgtcgg

SEQ ID NO: 183426 - DNA, 25 bp, Saccharomyces pastorianus
tcttcgagatcctctttttgataac

SEQ ID NO: 183427 - DNA, 25 bp, Saccharomyces pastorianus
gataatggcctcatggtaccatgca

SEQ ID NO: 183428 - DNA, 25 bp, Saccharomyces pastorianus
tacagagggtgtttccctcagggct

SEQ ID NO: 183429 - DNA, 25 bp, Saccharomyces pastorianus
gaaaagaccgcatgcattacagagg

SEQ ID NO: 183430 - DNA, 25 bp, Saccharomyces pastorianus
gtcggattttaaagataatggcctc

SEQ ID NO: 183431 - DNA, 25 bp, Saccharomyces pastorianus
gtctactatctaccgtcatttatct

SEQ ID NO: 183432 - DNA, 25 bp, Saccharomyces pastorianus
aatacgcaaccaatgccgcagttaa

SEQ ID NO: 183433 - DNA, 25 bp, Saccharomyces pastorianus
aagtattgtgcgcagtcttcgagaa

SEQ ID NO: 183434 - DNA, 25 bp, Saccharomyces pastorianus
ctcgaacttactcatgcagcacaat

SEQ ID NO: 183435 - DNA, 25 bp, Saccharomyces pastorianus
agaaatttatcataccccactgctc

SEQ ID NO: 183436 - DNA, 25 bp, Saccharomyces pastorianus
ctgcatcctcagaagctagtactct

SEQ ID NO: 183437 - DNA, 25 bp, Saccharomyces pastorianus
gttaaatcgacaactgcatcctcag

SEQ ID NO: 183438 - DNA, 25 bp, Saccharomyces pastorianus
aaatctggtggttgttctgaggact

SEQ ID NO: 183439 - DNA, 25 bp, Saccharomyces pastorianus
ctagtactctgggtgctctacaata

SEQ ID NO: 183440 - DNA, 25 bp, Saccharomyces pastorianus
gtcattcgtggacaaaatcgcaatt

SEQ ID NO: 183441 - DNA, 25 bp, Saccharomyces pastorianus
ttatctaccgctagaccggctttaa

SEQ ID NO: 183442 - DNA, 25 bp, Saccharomyces pastorianus
caagcacgggcatttttagaacagg

SEQ ID NO: 183443 - DNA, 25 bp, Saccharomyces pastorianus
ctccacttcaagtaagagtttgggt

SEQ ID NO: 183444 - DNA, 25 bp, Saccharomyces pastorianus
aaaatcatcaatatcaccccaagca

SEQ ID NO: 183445 - DNA, 25 bp, Saccharomyces pastorianus
gcacgggcatttttagaacaggttt

SEQ ID NO: 183446 - DNA, 25 bp, Saccharomyces pastorianus
gaaatgtggcattactccacttcaa

SEQ ID NO: 183447 - DNA, 25 bp, Saccharomyces pastorianus
agtagagcaacatacattacacaaa

SEQ ID NO: 183448 - DNA, 25 bp, Saccharomyces pastorianus
atatcaccccaagcacgggcatttt

SEQ ID NO: 183449 - DNA, 25 bp, Saccharomyces pastorianus
gaaagcaaagccttaattccaagga

SEQ ID NO: 183450 - DNA, 25 bp, Saccharomyces pastorianus
ggttagaaatataccaccacattaa

SEQ ID NO: 183451 - DNA, 25 bp, Saccharomyces pastorianus
gtggcattactccacttcaagtaag

SEQ ID NO: 183452 - DNA, 25 bp, Saccharomyces pastorianus
gagcccaaagggaaaatcatcaata

SEQ ID NO: 183453 - DNA, 25 bp, Saccharomyces pastorianus
gtagtatgggcatcgttttgggcaa

SEQ ID NO: 183454 - DNA, 25 bp, Saccharomyces pastorianus
tagtatgggcatcgttttgggcaaa

SEQ ID NO: 183455 - DNA, 25 bp, Saccharomyces pastorianus
gtatgggcatcgttttgggcaaaaa

SEQ ID NO: 183456 - DNA, 25 bp, Saccharomyces pastorianus
tgggcatcgttttgggcaaaaagga

SEQ ID NO: 183457 - DNA, 25 bp, Saccharomyces pastorianus
agtagtatgggcatcgttttgggca

SEQ ID NO: 183458 - DNA, 25 bp, Saccharomyces pastorianus
atgggcatcgttttgggcaaaaagg

SEQ ID NO: 183459 - DNA, 25 bp, Saccharomyces pastorianus
tatgggcatcgttttgggcaaaaag

SEQ ID NO: 183460 - DNA, 25 bp, Saccharomyces pastorianus
agtatgggcatcgttttgggcaaaa

SEQ ID NO: 183461 - DNA, 25 bp, Saccharomyces pastorianus
cgttacttagctgaagttggtaaag

SEQ ID NO: 183462 - DNA, 25 bp, Saccharomyces pastorianus
tccaaagcatttgagaggtacttta

SEQ ID NO: 183463 - DNA, 25 bp, Saccharomyces pastorianus
gttggtaaagtcgaagaagctaagc

SEQ ID NO: 183464 - DNA, 25 bp, Saccharomyces pastorianus
cttagctgaagttggtaaagtcgaa

SEQ ID NO: 183465 - DNA, 25 bp, Saccharomyces pastorianus
caattgatgattaccgctggtatct

SEQ ID NO: 183466 - DNA, 25 bp, Saccharomyces pastorianus
tgattaccgctggtatcttcttggg

SEQ ID NO: 183467 - DNA, 25 bp, Saccharomyces pastorianus
tgatgattaccgctggtatcttctt

SEQ ID NO: 183468 - DNA, 25 bp, Saccharomyces pastorianus
gaagttggtaaagtcgaagaagcta

SEQ ID NO: 183469 - DNA, 25 bp, Saccharomyces pastorianus
ccaattgatgattaccgctggtatc

SEQ ID NO: 183470 - DNA, 25 bp, Saccharomyces pastorianus
ctgaagttggtaaagtcgaagaagc

SEQ ID NO: 183471 - DNA, 25 bp, Saccharomyces pastorianus
tggtaaagtcgaagaagctaagcgt

SEQ ID NO: 183472 - DNA, 25 bp, Saccharomyces pastorianus
agtgttatcgcaatcagctgatcca

SEQ ID NO: 183473 - DNA, 25 bp, Saccharomyces pastorianus
tgaaaactgcctaaacaacgacccg

SEQ ID NO: 183474 - DNA, 25 bp, Saccharomyces pastorianus
gatccaagtttgctgatcgaccaat

SEQ ID NO: 183475 - DNA, 25 bp, Saccharomyces pastorianus
gatcgaccaattttctccggtaatt

SEQ ID NO: 183476 - DNA, 25 bp, Saccharomyces pastorianus
gagtctaactagcatcttagtcatt

SEQ ID NO: 183477 - DNA, 25 bp, Saccharomyces pastorianus
ccatttgtgtggttgagctctgaag

SEQ ID NO: 183478 - DNA, 25 bp, Saccharomyces pastorianus
gtgctcctaccgtcaattaacatat

SEQ ID NO: 183479 - DNA, 25 bp, Saccharomyces pastorianus
ttattcaaaggtgctcctaccgtca

SEQ ID NO: 183480 - DNA, 25 bp, Saccharomyces pastorianus
gccataccgctgcagcaagtgttat

SEQ ID NO: 183481 - DNA, 25 bp, Saccharomyces pastorianus
tcgtttttattttctgccataccgc

SEQ ID NO: 183482 - DNA, 25 bp, Saccharomyces pastorianus
aagattctagcttcaatttcaacaa

SEQ ID NO: 183483 - DNA, 25 bp, Saccharomyces pastorianus
tcacgcttacaaagatcgagtcggc

SEQ ID NO: 183484 - DNA, 25 bp, Saccharomyces pastorianus
gtcgtcattataactcacgcttaca

SEQ ID NO: 183485 - DNA, 25 bp, Saccharomyces pastorianus
tatcatttatcgcagaaactaatcg

SEQ ID NO: 183486 - DNA, 25 bp, Saccharomyces pastorianus
gatcgagtcggcgtacgacatctta

SEQ ID NO: 183487 - DNA, 25 bp, Saccharomyces pastorianus
cggcgtacgacatcttaccaacggt

SEQ ID NO: 183488 - DNA, 25 bp, Saccharomyces pastorianus
acgtaccattttttgtgattttcag

SEQ ID NO: 183489 - DNA, 25 bp, Saccharomyces pastorianus
cagttaggtggagtcgaattccata

SEQ ID NO: 183490 - DNA, 25 bp, Saccharomyces pastorianus
gaaactaatcgatttgggccattct

SEQ ID NO: 183491 - DNA, 25 bp, Saccharomyces pastorianus
tttcagagaaaccactttccccact

SEQ ID NO: 183492 - DNA, 25 bp, Saccharomyces pastorianus
tgggccattctgtcgtcattataac

SEQ ID NO: 183493 - DNA, 25 bp, Saccharomyces pastorianus
gtcgaattccatatatatcatttat

SEQ ID NO: 183494 - DNA, 25 bp, Saccharomyces pastorianus
cttcttctttcttctatagaggtaa

SEQ ID NO: 183495 - DNA, 25 bp, Saccharomyces pastorianus
gatgaagattgcgatttactgaaca

SEQ ID NO: 183496 - DNA, 25 bp, Saccharomyces pastorianus
ggagcctgtctaccaaatgcatatc

SEQ ID NO: 183497 - DNA, 25 bp, Saccharomyces pastorianus
aaacaccttccaaaagactgtggag

SEQ ID NO: 183498 - DNA, 25 bp, Saccharomyces pastorianus
actgaacaagactttgaccttcgaa

SEQ ID NO: 183499 - DNA, 25 bp, Saccharomyces pastorianus
aggatattgctgttttgcgttccaa

SEQ ID NO: 183500 - DNA, 25 bp, Saccharomyces pastorianus
tagaggtaactacaccgactttgaa

SEQ ID NO: 183501 - DNA, 25 bp, Saccharomyces pastorianus
gctgttttgcgttccaaagaatggt

SEQ ID NO: 183502 - DNA, 25 bp, Saccharomyces pastorianus
cgaaactgaagtcactttcaagaac

SEQ ID NO: 183503 - DNA, 25 bp, Saccharomyces pastorianus
gaatggttccaattagatgatgaag

SEQ ID NO: 183504 - DNA, 25 bp, Saccharomyces pastorianus
aaagactgtggagcctgtctaccaa

SEQ ID NO: 183505 - DNA, 25 bp, Saccharomyces pastorianus
gctttacaattagcgaaacagcatt

SEQ ID NO: 183506 - DNA, 25 bp, Saccharomyces pastorianus
gaaaatcaaattaacatcatcatcc

SEQ ID NO: 183507 - DNA, 25 bp, Saccharomyces pastorianus
gataactccaaaatctttagaaaat

SEQ ID NO: 183508 - DNA, 25 bp, Saccharomyces pastorianus
gcattcattatcaccgctagatgtt

SEQ ID NO: 183509 - DNA, 25 bp, Saccharomyces pastorianus
ataggataactccaaaatctttaga

SEQ ID NO: 183510 - DNA, 25 bp, Saccharomyces pastorianus
tttgctttacaattagcgaaacagc

SEQ ID NO: 183511 - DNA, 25 bp, Saccharomyces pastorianus
caaattaacatcatcatccaaaagg

SEQ ID NO: 183512 - DNA, 25 bp, Saccharomyces pastorianus
atcatccaaaaggaactgtaccctt

SEQ ID NO: 183513 - DNA, 25 bp, Saccharomyces pastorianus
attagcgaaacagcattcattatca

SEQ ID NO: 183514 - DNA, 25 bp, Saccharomyces pastorianus
attaacatcatcatccaaaaggaac

SEQ ID NO: 183515 - DNA, 25 bp, Saccharomyces pastorianus
agcattcattatcaccgctagatgt

SEQ ID NO: 183516 - DNA, 25 bp, Saccharomyces pastorianus
atattcgccaacgtcgccatcgtat

SEQ ID NO: 183517 - DNA, 25 bp, Saccharomyces pastorianus
atcatattcgccaacgtcaccatca

SEQ ID NO: 183518 - DNA, 25 bp, Saccharomyces pastorianus
gtactcacctacatcaccatcgtat

SEQ ID NO: 183519 - DNA, 25 bp, Saccharomyces pastorianus
atcaccatcgtattcaccaacgtca

SEQ ID NO: 183520 - DNA, 25 bp, Saccharomyces pastorianus
tattcgccaacgtcaccatcatatt

SEQ ID NO: 183521 - DNA, 25 bp, Saccharomyces pastorianus
cgtattcaccaacgtcaccatcata

SEQ ID NO: 183522 - DNA, 25 bp, Saccharomyces pastorianus
accaacatcaccatcgtactcacct

SEQ ID NO: 183523 - DNA, 25 bp, Saccharomyces pastorianus
attcgccaacgtcgccatcgtattc

SEQ ID NO: 183524 - DNA, 25 bp, Saccharomyces pastorianus
aacgtcaccatcatattcgccaacg

SEQ ID NO: 183525 - DNA, 25 bp, Saccharomyces pastorianus
gtcaccatcatattcgccaacgtca

SEQ ID NO: 183526 - DNA, 25 bp, Saccharomyces pastorianus
gtcaccatcatattcgccaacgtcg

SEQ ID NO: 183527 - DNA, 25 bp, Saccharomyces pastorianus
ccgttgatgttatggcaggtcgtcc

SEQ ID NO: 183528 - DNA, 25 bp, Saccharomyces pastorianus
ggaagcaactggtcgtggtaagatc

SEQ ID NO: 183529 - DNA, 25 bp, Saccharomyces pastorianus
ctggtggtttaggtcaattggctat

SEQ ID NO: 183530 - DNA, 25 bp, Saccharomyces pastorianus
ggccattggatgtcagagtcggatt

SEQ ID NO: 183531 - DNA, 25 bp, Saccharomyces pastorianus
gttgctgttgctaataactggccat

SEQ ID NO: 183532 - DNA, 25 bp, Saccharomyces pastorianus
gatcattggtactgactcccataca

SEQ ID NO: 183533 - DNA, 25 bp, Saccharomyces pastorianus
aaatcggtgctaccacatctgtttt

SEQ ID NO: 183534 - DNA, 25 bp, Saccharomyces pastorianus
gaacactctggaaccatacatcaat

SEQ ID NO: 183535 - DNA, 25 bp, Saccharomyces pastorianus
accacaaggatctattatctgctga

SEQ ID NO: 183536 - DNA, 25 bp, Saccharomyces pastorianus
gctgactttgctaaattataccaca

SEQ ID NO: 183537 - DNA, 25 bp, Saccharomyces pastorianus
aattggctggtatcacaactgtcaa

SEQ ID NO: 183538 - DNA, 25 bp, Saccharomyces pastorianus
gcctagtggacttgccttggatagt

SEQ ID NO: 183539 - DNA, 25 bp, Saccharomyces pastorianus
ttggatagtctttccacttgctcct

SEQ ID NO: 183540 - DNA, 25 bp, Saccharomyces pastorianus
gctcctccaggatcttttgggtcaa

SEQ ID NO: 183541 - DNA, 25 bp, Saccharomyces pastorianus
aacttgttcttgtcgcctagtggac

SEQ ID NO: 183542 - DNA, 25 bp, Saccharomyces pastorianus
gaattcactgaatttctcacctctg

SEQ ID NO: 183543 - DNA, 25 bp, Saccharomyces pastorianus
gcaagaaatacttagcggccagcgc

SEQ ID NO: 183544 - DNA, 25 bp, Saccharomyces pastorianus
gtggtcacaatctcgtcgtacaata

SEQ ID NO: 183545 - DNA, 25 bp, Saccharomyces pastorianus
gggtgaccttttcgccggtgtcact

SEQ ID NO: 183546 - DNA, 25 bp, Saccharomyces pastorianus
gggtggccttggtggtcacaatctc

SEQ ID NO: 183547 - DNA, 25 bp, Saccharomyces pastorianus
agcggccagcgcgaacttgttcttg

SEQ ID NO: 183548 - DNA, 25 bp, Saccharomyces pastorianus
tctcacctctgatttctggcaagaa

SEQ ID NO: 183549 - DNA, 25 bp, Saccharomyces pastorianus
agcactaatgccactaccactggaa

SEQ ID NO: 183550 - DNA, 25 bp, Saccharomyces pastorianus
acactagtgccactaccactgctag

SEQ ID NO: 183551 - DNA, 25 bp, Saccharomyces pastorianus
actaatgccactaccactggaagta

SEQ ID NO: 183552 - DNA, 25 bp, Saccharomyces pastorianus
gtgccactaccactgctagcaccaa

SEQ ID NO: 183553 - DNA, 25 bp, Saccharomyces pastorianus
aacactagtgccactaccactgcta

SEQ ID NO: 183554 - DNA, 25 bp, Saccharomyces pastorianus
gcactaatgccactaccactggaag

SEQ ID NO: 183555 - DNA, 25 bp, Saccharomyces pastorianus
ctaatgccactaccactggaagtac

SEQ ID NO: 183556 - DNA, 25 bp, Saccharomyces pastorianus
atgccactaccactggaagtaccaa

SEQ ID NO: 183557 - DNA, 25 bp, Saccharomyces pastorianus
taatgccactaccactggaagtacc

SEQ ID NO: 183558 - DNA, 25 bp, Saccharomyces pastorianus
ctagtgccactaccactgctagcac

SEQ ID NO: 183559 - DNA, 25 bp, Saccharomyces pastorianus
cactaatgccactaccactggaagt

SEQ ID NO: 183560 - DNA, 25 bp, Saccharomyces pastorianus
gttctaggaccacaactgtcaacaa

SEQ ID NO: 183561 - DNA, 25 bp, Saccharomyces pastorianus
gtgcatctcaggctactgaaggagt

SEQ ID NO: 183562 - DNA, 25 bp, Saccharomyces pastorianus
tacggttatatgaaaggtgcatctc

SEQ ID NO: 183563 - DNA, 25 bp, Saccharomyces pastorianus
tatgaaaggtgcatctcaggctact

SEQ ID NO: 183564 - DNA, 25 bp, Saccharomyces pastorianus
ggagcacttttgaatacggttatat

SEQ ID NO: 183565 - DNA, 25 bp, Saccharomyces pastorianus
aggaccacaactgtcaacaaagaag

SEQ ID NO: 183566 - DNA, 25 bp, Saccharomyces pastorianus
gaaaggtgcatctcaggctactgaa

SEQ ID NO: 183567 - DNA, 25 bp, Saccharomyces pastorianus
gatttccagttctaggaccacaact

SEQ ID NO: 183568 - DNA, 25 bp, Saccharomyces pastorianus
tactggatggagcacttttgaatac

SEQ ID NO: 183569 - DNA, 25 bp, Saccharomyces pastorianus
gatggagcacttttgaatacggtta

SEQ ID NO: 183570 - DNA, 25 bp, Saccharomyces pastorianus
aactgtcaacaaagaagccaagacc

SEQ ID NO: 183571 - DNA, 25 bp, Saccharomyces pastorianus
gctttacctctatataatgcctctt

SEQ ID NO: 183572 - DNA, 25 bp, Saccharomyces pastorianus
ttagcgatgacttttcatgagaggg

SEQ ID NO: 183573 - DNA, 25 bp, Saccharomyces pastorianus
cctgtaggctttacctctatataat

SEQ ID NO: 183574 - DNA, 25 bp, Saccharomyces pastorianus
tgccaaagacaacctacgggaacct

SEQ ID NO: 183575 - DNA, 25 bp, Saccharomyces pastorianus
tacctctatataatgcctctttttt

SEQ ID NO: 183576 - DNA, 25 bp, Saccharomyces pastorianus
cagtgttcctctttagcgatgactt

SEQ ID NO: 183577 - DNA, 25 bp, Saccharomyces pastorianus
ttttaacacttttttgaggcagaag

SEQ ID NO: 183578 - DNA, 25 bp, Saccharomyces pastorianus
ggagagcggtgatgtgttatcttgc

SEQ ID NO: 183579 - DNA, 25 bp, Saccharomyces pastorianus
ttcctctttagcgatgacttttcat

SEQ ID NO: 183580 - DNA, 25 bp, Saccharomyces pastorianus
gacaacctacgggaaccttcagtgt

SEQ ID NO: 183581 - DNA, 25 bp, Saccharomyces pastorianus
aaccttcagtgttcctctttagcga

SEQ ID NO: 183582 - DNA, 25 bp, Saccharomyces pastorianus
tacgtatacgtattcttcgttgttc

SEQ ID NO: 183583 - DNA, 25 bp, Saccharomyces pastorianus
gaagtccaccaaatgggttcctcct

SEQ ID NO: 183584 - DNA, 25 bp, Saccharomyces pastorianus
gactaagggcttgacactagaggaa

SEQ ID NO: 183585 - DNA, 25 bp, Saccharomyces pastorianus
actccattcatcacttcagcaatta

SEQ ID NO: 183586 - DNA, 25 bp, Saccharomyces pastorianus
gaggattatgatttgaatgctacca

SEQ ID NO: 183587 - DNA, 25 bp, Saccharomyces pastorianus
atggtgttcgcatacgtatacgtat

SEQ ID NO: 183588 - DNA, 25 bp, Saccharomyces pastorianus
atgtcaattgccagtgcatgtaact

SEQ ID NO: 183589 - DNA, 25 bp, Saccharomyces pastorianus
ctatggatatgtctttatgggctgt

SEQ ID NO: 183590 - DNA, 25 bp, Saccharomyces pastorianus
gaatgctaccagaaacgacactaga

SEQ ID NO: 183591 - DNA, 25 bp, Saccharomyces pastorianus
tgtacgaagaaaacgtcttaccttg

SEQ ID NO: 183592 - DNA, 25 bp, Saccharomyces pastorianus
ttcttcgttgttcccgagactaagg

SEQ ID NO: 183593 - DNA, 25 bp, Saccharomyces pastorianus
actgctaagttggttaacgactttg

SEQ ID NO: 183594 - DNA, 25 bp, Saccharomyces pastorianus
ttatattcaaccatcacacacgtct

SEQ ID NO: 183595 - DNA, 25 bp, Saccharomyces pastorianus
ggttcagacattcacgaggccctac

SEQ ID NO: 183596 - DNA, 25 bp, Saccharomyces pastorianus
tagtgtgtattattgcggccgtttt

SEQ ID NO: 183597 - DNA, 25 bp, Saccharomyces pastorianus
tattgcggccgttttagttatttag

SEQ ID NO: 183598 - DNA, 25 bp, Saccharomyces pastorianus
gggtataaactaagacaactgctaa

SEQ ID NO: 183599 - DNA, 25 bp, Saccharomyces pastorianus
gaggccctacattatccagtttaca

SEQ ID NO: 183600 - DNA, 25 bp, Saccharomyces pastorianus
acgtctttccctgaaacgcttgaga

SEQ ID NO: 183601 - DNA, 25 bp, Saccharomyces pastorianus
attagccaaggtatatagcagcatt

SEQ ID NO: 183602 - DNA, 25 bp, Saccharomyces pastorianus
tggccatttgcttcacttatattca

SEQ ID NO: 183603 - DNA, 25 bp, Saccharomyces pastorianus
agttatttagtctcatggccatttg

SEQ ID NO: 183604 - DNA, 25 bp, Saccharomyces pastorianus
tcagcacttcccatcccgatttagg

SEQ ID NO: 183605 - DNA, 25 bp, Saccharomyces pastorianus
agatgatacccacagcaatgcaaat

SEQ ID NO: 183606 - DNA, 25 bp, Saccharomyces pastorianus
aaagttgtaacccagtcagcacttc

SEQ ID NO: 183607 - DNA, 25 bp, Saccharomyces pastorianus
aatcgcctatgacgcaagagactac

SEQ ID NO: 183608 - DNA, 25 bp, Saccharomyces pastorianus
gaaggctaattcgaaactcaaaaca

SEQ ID NO: 183609 - DNA, 25 bp, Saccharomyces pastorianus
gtaactgcacaaaaatcgcctatga

SEQ ID NO: 183610 - DNA, 25 bp, Saccharomyces pastorianus
gtagtaacgcagatgatacccacag

SEQ ID NO: 183611 - DNA, 25 bp, Saccharomyces pastorianus
gaacgttcaaggactgccagcttat

SEQ ID NO: 183612 - DNA, 25 bp, Saccharomyces pastorianus
aaagcaattatcaggtaagcacaag

SEQ ID NO: 183613 - DNA, 25 bp, Saccharomyces pastorianus
tgatgattcaataggtacgcaagta

SEQ ID NO: 183614 - DNA, 25 bp, Saccharomyces pastorianus
taacactcaaattcaaagccgactt

SEQ ID NO: 183615 - DNA, 25 bp, Saccharomyces pastorianus
gaaaaaacatcttgctcgattgaga

SEQ ID NO: 183616 - DNA, 25 bp, Saccharomyces pastorianus
gataatttttcggaatctcatggta

SEQ ID NO: 183617 - DNA, 25 bp, Saccharomyces pastorianus
accacgtcatacacaccaggaatat

SEQ ID NO: 183618 - DNA, 25 bp, Saccharomyces pastorianus
acaccaggaatattgtggcctacaa

SEQ ID NO: 183619 - DNA, 25 bp, Saccharomyces pastorianus
agaattctgtcattaccacagcatt

SEQ ID NO: 183620 - DNA, 25 bp, Saccharomyces pastorianus
aaacagcgcctcacgtaaatgtaaa

SEQ ID NO: 183621 - DNA, 25 bp, Saccharomyces pastorianus
gagggagcaaaccacgtcatacaca

SEQ ID NO: 183622 - DNA, 25 bp, Saccharomyces pastorianus
gggttgtattcaatatcatcagtga

SEQ ID NO: 183623 - DNA, 25 bp, Saccharomyces pastorianus
ggatactgtggcatgaatacgcaat

SEQ ID NO: 183624 - DNA, 25 bp, Saccharomyces pastorianus
ttgccgagagtggttcatttgattc

SEQ ID NO: 183625 - DNA, 25 bp, Saccharomyces pastorianus
tgaatacgcaattgtggacacagaa

SEQ ID NO: 183626 - DNA, 25 bp, Saccharomyces pastorianus
aaaaccagctcaccaataccagaag

SEQ ID NO: 183627 - DNA, 25 bp, Saccharomyces pastorianus
gtaaaggctcatcgactgccaacga

SEQ ID NO: 183628 - DNA, 25 bp, Saccharomyces pastorianus
ctgccaacgacccaaacatacaaat

SEQ ID NO: 183629 - DNA, 25 bp, Saccharomyces pastorianus
gcagaagctggttcagatgctgata

SEQ ID NO: 183630 - DNA, 25 bp, Saccharomyces pastorianus
ggagcttgctttcccaaatgctgca

SEQ ID NO: 183631 - DNA, 25 bp, Saccharomyces pastorianus
gaagacgttggactaccggattcaa

SEQ ID NO: 183632 - DNA, 25 bp, Saccharomyces pastorianus
ggtctactatcaccgactgaagaga

SEQ ID NO: 183633 - DNA, 25 bp, Saccharomyces pastorianus
agacttgttggcacggagcttgctt

SEQ ID NO: 183634 - DNA, 25 bp, Saccharomyces pastorianus
tattcccagcggcaattacaaagag

SEQ ID NO: 183635 - DNA, 25 bp, Saccharomyces pastorianus
acagatgctccgttgtttagaatcg

SEQ ID NO: 183636 - DNA, 25 bp, Saccharomyces pastorianus
tcagtgttgatattcccagcggcaa

SEQ ID NO: 183637 - DNA, 25 bp, Saccharomyces pastorianus
gattattctcttgctgttattcttc

SEQ ID NO: 183638 - DNA, 25 bp, Saccharomyces pastorianus
gagacttgatctccaacatatctat

SEQ ID NO: 183639 - DNA, 25 bp, Saccharomyces pastorianus
ttaaacggcgcctcacaaaggagat

SEQ ID NO: 183640 - DNA, 25 bp, Saccharomyces pastorianus
gaatctctatgtgcggactatgggc

SEQ ID NO: 183641 - DNA, 25 bp, Saccharomyces pastorianus
gattatcgaaagctattttgggcct

SEQ ID NO: 183642 - DNA, 25 bp, Saccharomyces pastorianus
agtttcttgcgtcttcattatccta

SEQ ID NO: 183643 - DNA, 25 bp, Saccharomyces pastorianus
atcatgcgcatcttgcttaggaggc

SEQ ID NO: 183644 - DNA, 25 bp, Saccharomyces pastorianus
ataatttttctagctatcggcataa

SEQ ID NO: 183645 - DNA, 25 bp, Saccharomyces pastorianus
atgtgcaggctctacaaaacccaaa

SEQ ID NO: 183646 - DNA, 25 bp, Saccharomyces pastorianus
attttgggccttaccattttcgcat

SEQ ID NO: 183647 - DNA, 25 bp, Saccharomyces pastorianus
tgctgttattcttcggagggcctaa

SEQ ID NO: 183648 - DNA, 25 bp, Saccharomyces pastorianus
agaagcagacccttttgcaggcatt

SEQ ID NO: 183649 - DNA, 25 bp, Saccharomyces pastorianus
gcaagagccacttcgagaaatcaaa

SEQ ID NO: 183650 - DNA, 25 bp, Saccharomyces pastorianus
taaacttaccaccagttggcaaaag

SEQ ID NO: 183651 - DNA, 25 bp, Saccharomyces pastorianus
gacacggcaaacaggaaagctttat

SEQ ID NO: 183652 - DNA, 25 bp, Saccharomyces pastorianus
gatctacagcatgcaagagccactt

SEQ ID NO: 183653 - DNA, 25 bp, Saccharomyces pastorianus
tggcgtttatcaaagtacggctgct

SEQ ID NO: 183654 - DNA, 25 bp, Saccharomyces pastorianus
acaagctacaacgagatgcagattc

SEQ ID NO: 183655 - DNA, 25 bp, Saccharomyces pastorianus
tgcgttccaaaagccaagttaatac

SEQ ID NO: 183656 - DNA, 25 bp, Saccharomyces pastorianus
ggcattcctgagataaacttaccac

SEQ ID NO: 183657 - DNA, 25 bp, Saccharomyces pastorianus
tcctcaccatttttgcgttccaaaa

SEQ ID NO: 183658 - DNA, 25 bp, Saccharomyces pastorianus
gaaaaaacgtagctcctcaccattt

SEQ ID NO: 183659 - DNA, 25 bp, Saccharomyces pastorianus
aaagaaataaagattgcagcacctg

SEQ ID NO: 183660 - DNA, 25 bp, Saccharomyces pastorianus
ataaagattgcagcacctgagtttc

SEQ ID NO: 183661 - DNA, 25 bp, Saccharomyces pastorianus
aagaaataaagattgcagcacctga

SEQ ID NO: 183662 - DNA, 25 bp, Saccharomyces pastorianus
aaagattgcagcacctgagtttcgc

SEQ ID NO: 183663 - DNA, 25 bp, Saccharomyces pastorianus
gaaataaagattgcagcacctgagt

SEQ ID NO: 183664 - DNA, 25 bp, Saccharomyces pastorianus
aaaagaaataaagattgcagcacct

SEQ ID NO: 183665 - DNA, 25 bp, Saccharomyces pastorianus
agaaataaagattgcagcacctgag

SEQ ID NO: 183666 - DNA, 25 bp, Saccharomyces pastorianus
aaaaagaaataaagattgcagcacc

SEQ ID NO: 183667 - DNA, 25 bp, Saccharomyces pastorianus
aaaaaagaaataaagattgcagcac

SEQ ID NO: 183668 - DNA, 25 bp, Saccharomyces pastorianus
aataaagattgcagcacctgagttt

SEQ ID NO: 183669 - DNA, 25 bp, Saccharomyces pastorianus
aaataaagattgcagcacctgagtt

SEQ ID NO: 183670 - DNA, 25 bp, Saccharomyces pastorianus
atcaaacttggtgctttactatagg

SEQ ID NO: 183671 - DNA, 25 bp, Saccharomyces pastorianus
cacagggtcttatttcggcgtaatc

SEQ ID NO: 183672 - DNA, 25 bp, Saccharomyces pastorianus
taaagtcgaatgtgcccgtttcttg

SEQ ID NO: 183673 - DNA, 25 bp, Saccharomyces pastorianus
gtaccggatcatttattgtttcagg

SEQ ID NO: 183674 - DNA, 25 bp, Saccharomyces pastorianus
gatttgccatcgacattcgtcatgc

SEQ ID NO: 183675 - DNA, 25 bp, Saccharomyces pastorianus
tgcccgtttcttgcagtttcaaagg

SEQ ID NO: 183676 - DNA, 25 bp, Saccharomyces pastorianus
gaatcaattgcagacttccatttca

SEQ ID NO: 183677 - DNA, 25 bp, Saccharomyces pastorianus
gttttccgactttgatggacggctt

SEQ ID NO: 183678 - DNA, 25 bp, Saccharomyces pastorianus
tggacggcttaattctttgcagact

SEQ ID NO: 183679 - DNA, 25 bp, Saccharomyces pastorianus
actgtgccaaagactgtaccggatc

SEQ ID NO: 183680 - DNA, 25 bp, Saccharomyces pastorianus
ggtggatcgcctacaaagaaattca

SEQ ID NO: 183681 - DNA, 25 bp, Saccharomyces pastorianus
gatgctatctggatttcgccattct

SEQ ID NO: 183682 - DNA, 25 bp, Saccharomyces pastorianus
ggtgccgatgctatctggatttcgc

SEQ ID NO: 183683 - DNA, 25 bp, Saccharomyces pastorianus
tcaaggagagcaggtcttctaagac

SEQ ID NO: 183684 - DNA, 25 bp, Saccharomyces pastorianus
gctacgatgccgatggcgcaccaat

SEQ ID NO: 183685 - DNA, 25 bp, Saccharomyces pastorianus
ctggatttcgccattctacgactcg

SEQ ID NO: 183686 - DNA, 25 bp, Saccharomyces pastorianus
tggtcatcaaccattgttccagtga

SEQ ID NO: 183687 - DNA, 25 bp, Saccharomyces pastorianus
tcgccttgattgataagacccataa

SEQ ID NO: 183688 - DNA, 25 bp, Saccharomyces pastorianus
ggactgcttcgccttgattgataag

SEQ ID NO: 183689 - DNA, 25 bp, Saccharomyces pastorianus
gagagcacctaagggctacgatgcc

SEQ ID NO: 183690 - DNA, 25 bp, Saccharomyces pastorianus
gttccagtgaacacgagtggttcaa

SEQ ID NO: 183691 - DNA, 25 bp, Saccharomyces pastorianus
gcaggtcttctaagactaatccaaa

SEQ ID NO: 183692 - DNA, 25 bp, Saccharomyces pastorianus
cgacgatgacgatgacgatgaagat

SEQ ID NO: 183693 - DNA, 25 bp, Saccharomyces pastorianus
gacgacgacgacgacgacgatgacg

SEQ ID NO: 183694 - DNA, 25 bp, Saccharomyces pastorianus
gacgatgacgatgacgatgaagatg

SEQ ID NO: 183695 - DNA, 25 bp, Saccharomyces pastorianus
acgacgacgacgacgacgatgacga

SEQ ID NO: 183696 - DNA, 25 bp, Saccharomyces pastorianus
cgatgacgatgacgacgacgacgac

SEQ ID NO: 183697 - DNA, 25 bp, Saccharomyces pastorianus
cgatgacgatgacgatgaagatgaa

SEQ ID NO: 183698 - DNA, 25 bp, Saccharomyces pastorianus
cgacgacgacgacgatgacgatgac

SEQ ID NO: 183699 - DNA, 25 bp, Saccharomyces pastorianus
tgaagatgaagacgaagatggcggg

SEQ ID NO: 183700 - DNA, 25 bp, Saccharomyces pastorianus
taacgacgacgacgacgacgacgat

SEQ ID NO: 183701 - DNA, 25 bp, Saccharomyces pastorianus
aacgacgacgacgacgacgacgatg

SEQ ID NO: 183702 - DNA, 25 bp, Saccharomyces pastorianus
cgacgacgacgacgacgacgatgac

SEQ ID NO: 183703 - DNA, 25 bp, Saccharomyces pastorianus
gtgtcaacagtcaaagccttctatt

SEQ ID NO: 183704 - DNA, 25 bp, Saccharomyces pastorianus
gtgaatccctgtgtaagaccgtaat

SEQ ID NO: 183705 - DNA, 25 bp, Saccharomyces pastorianus
atagattccatttttgtcagcctga

SEQ ID NO: 183706 - DNA, 25 bp, Saccharomyces pastorianus
gtagcgcctaccacttacagggaaa

SEQ ID NO: 183707 - DNA, 25 bp, Saccharomyces pastorianus
tatttaccaggtgtagcgcctacca

SEQ ID NO: 183708 - DNA, 25 bp, Saccharomyces pastorianus
atgacaacatcccattgctcgttaa

SEQ ID NO: 183709 - DNA, 25 bp, Saccharomyces pastorianus
gacggtaataacgtttctggcgata

SEQ ID NO: 183710 - DNA, 25 bp, Saccharomyces pastorianus
gaaaatttcttgtactcatacgact

SEQ ID NO: 183711 - DNA, 25 bp, Saccharomyces pastorianus
cacgtacagcttttgttgttgtatt

SEQ ID NO: 183712 - DNA, 25 bp, Saccharomyces pastorianus
gtaattccgggagatgatgctaaat

SEQ ID NO: 183713 - DNA, 25 bp, Saccharomyces pastorianus
acatcccattgctcgttaatcattt

SEQ ID NO: 183714 - DNA, 25 bp, Saccharomyces pastorianus
tgaacaaccgactatcttcgcctat

SEQ ID NO: 183715 - DNA, 25 bp, Saccharomyces pastorianus
aacgctgatttttcgaagctactgg

SEQ ID NO: 183716 - DNA, 25 bp, Saccharomyces pastorianus
aatgagttgttatcccacaccatgg

SEQ ID NO: 183717 - DNA, 25 bp, Saccharomyces pastorianus
gatgaagctctgttcaactcaaatg

SEQ ID NO: 183718 - DNA, 25 bp, Saccharomyces pastorianus
gagaccctgccaacattagtagatg

SEQ ID NO: 183719 - DNA, 25 bp, Saccharomyces pastorianus
tacctgataaccttgataacgctga

SEQ ID NO: 183720 - DNA, 25 bp, Saccharomyces pastorianus
aactatctgagccaatcgatgcaag

SEQ ID NO: 183721 - DNA, 25 bp, Saccharomyces pastorianus
tcccacaccatggatcctgtaaata

SEQ ID NO: 183722 - DNA, 25 bp, Saccharomyces pastorianus
tgggacaaccgccacaaaagactgt

SEQ ID NO: 183723 - DNA, 25 bp, Saccharomyces pastorianus
cgatgcaagtttaccgctaccgaat

SEQ ID NO: 183724 - DNA, 25 bp, Saccharomyces pastorianus
acagatgctgaaactacccaacgaa

SEQ ID NO: 183725 - DNA, 25 bp, Saccharomyces pastorianus
gaccccttgcactgtttaattatcg

SEQ ID NO: 183726 - DNA, 25 bp, Saccharomyces pastorianus
gtgacatctccggaaggccagaatg

SEQ ID NO: 183727 - DNA, 25 bp, Saccharomyces pastorianus
gcagactcggaagacaagatccaaa

SEQ ID NO: 183728 - DNA, 25 bp, Saccharomyces pastorianus
aagcggtgacatctccggaaggcca

SEQ ID NO: 183729 - DNA, 25 bp, Saccharomyces pastorianus
aaaacattgttatcaaagcggtgac

SEQ ID NO: 183730 - DNA, 25 bp, Saccharomyces pastorianus
tgaaacgaggacaactgagagaatt

SEQ ID NO: 183731 - DNA, 25 bp, Saccharomyces pastorianus
gtttaattatcgcagactcggaaga

SEQ ID NO: 183732 - DNA, 25 bp, Saccharomyces pastorianus
atgaactttgaggaccccttgcact

SEQ ID NO: 183733 - DNA, 25 bp, Saccharomyces pastorianus
tctccggaaggccagaatgacttga

SEQ ID NO: 183734 - DNA, 25 bp, Saccharomyces pastorianus
acaactgagagaattggcggaactt

SEQ ID NO: 183735 - DNA, 25 bp, Saccharomyces pastorianus
ttgaggaccccttgcactgtttaat

SEQ ID NO: 183736 - DNA, 25 bp, Saccharomyces pastorianus
aaccggatataagtctgagctttct

SEQ ID NO: 183737 - DNA, 25 bp, Saccharomyces pastorianus
aaatgatatatgcatctacggttgc

SEQ ID NO: 183738 - DNA, 25 bp, Saccharomyces pastorianus
gccatcgttgttttctttgggaatg

SEQ ID NO: 183739 - DNA, 25 bp, Saccharomyces pastorianus
gctgcttctttcatccactagaatt

SEQ ID NO: 183740 - DNA, 25 bp, Saccharomyces pastorianus
aagtctgagctttctgttggatata

SEQ ID NO: 183741 - DNA, 25 bp, Saccharomyces pastorianus
acccttgtggccatcgttgttttct

SEQ ID NO: 183742 - DNA, 25 bp, Saccharomyces pastorianus
ttataaacttcaacacgccacctgg

SEQ ID NO: 183743 - DNA, 25 bp, Saccharomyces pastorianus
aatggtgaacctttccatgtgtcgt

SEQ ID NO: 183744 - DNA, 25 bp, Saccharomyces pastorianus
ctttccatgtgtcgttgtctgtaga

SEQ ID NO: 183745 - DNA, 25 bp, Saccharomyces pastorianus
agaatttctctcttaaaccggatat

SEQ ID NO: 183746 - DNA, 25 bp, Saccharomyces pastorianus
agaaatggtgttcgtgctgcttctt

SEQ ID NO: 183747 - DNA, 25 bp, Saccharomyces pastorianus
cttccaagtattctttgtattcctc

SEQ ID NO: 183748 - DNA, 25 bp, Saccharomyces pastorianus
ggctcgatgtcttccaagtattctt

SEQ ID NO: 183749 - DNA, 25 bp, Saccharomyces pastorianus
ctcgatgtcttccaagtattctttg

SEQ ID NO: 183750 - DNA, 25 bp, Saccharomyces pastorianus
tatggctcgatgtcttccaagtatt

SEQ ID NO: 183751 - DNA, 25 bp, Saccharomyces pastorianus
tcttccaagtattctttgtattcct

SEQ ID NO: 183752 - DNA, 25 bp, Saccharomyces pastorianus
tggctcgatgtcttccaagtattct

SEQ ID NO: 183753 - DNA, 25 bp, Saccharomyces pastorianus
cgatgtcttccaagtattctttgta

SEQ ID NO: 183754 - DNA, 25 bp, Saccharomyces pastorianus
gatgtcttccaagtattctttgtat

SEQ ID NO: 183755 - DNA, 25 bp, Saccharomyces pastorianus
atatggctcgatgtcttccaagtat

SEQ ID NO: 183756 - DNA, 25 bp, Saccharomyces pastorianus
atggctcgatgtcttccaagtattc

SEQ ID NO: 183757 - DNA, 25 bp, Saccharomyces pastorianus
tcgatgtcttccaagtattctttgt

SEQ ID NO: 183758 - DNA, 25 bp, Saccharomyces pastorianus
ataatattataaatgattctgttcc

SEQ ID NO: 183759 - DNA, 25 bp, Saccharomyces pastorianus
taatattataaatgattctgttcct

SEQ ID NO: 183760 - DNA, 25 bp, Saccharomyces pastorianus
tataaatgattctgttcctcttttt

SEQ ID NO: 183761 - DNA, 25 bp, Saccharomyces pastorianus
attctgttcctctttttatatgttg

SEQ ID NO: 183762 - DNA, 25 bp, Saccharomyces pastorianus
tgattctgttcctctttttatatgt

SEQ ID NO: 183763 - DNA, 25 bp, Saccharomyces pastorianus
aaatgattctgttcctctttttata

SEQ ID NO: 183764 - DNA, 25 bp, Saccharomyces pastorianus
tattataaatgattctgttcctctt

SEQ ID NO: 183765 - DNA, 25 bp, Saccharomyces pastorianus
ttataaatgattctgttcctctttt

SEQ ID NO: 183766 - DNA, 25 bp, Saccharomyces pastorianus
atattataaatgattctgttcctct

SEQ ID NO: 183767 - DNA, 25 bp, Saccharomyces pastorianus
attataaatgattctgttcctcttt

SEQ ID NO: 183768 - DNA, 25 bp, Saccharomyces pastorianus
ataaatgattctgttcctcttttta

SEQ ID NO: 183769 - DNA, 25 bp, Saccharomyces pastorianus
ggtttcttcgaagcttatctatcct

SEQ ID NO: 183770 - DNA, 25 bp, Saccharomyces pastorianus
gtacatcggacacaagatctataag

SEQ ID NO: 183771 - DNA, 25 bp, Saccharomyces pastorianus
gttatggttatgtacatcggacaca

SEQ ID NO: 183772 - DNA, 25 bp, Saccharomyces pastorianus
acgttgctctattccccgtgggaga

SEQ ID NO: 183773 - DNA, 25 bp, Saccharomyces pastorianus
aagatggacattgatacgggtagaa

SEQ ID NO: 183774 - DNA, 25 bp, Saccharomyces pastorianus
ggttattattatgttcattgcccaa

SEQ ID NO: 183775 - DNA, 25 bp, Saccharomyces pastorianus
attggaagcttttcatcccagcaga

SEQ ID NO: 183776 - DNA, 25 bp, Saccharomyces pastorianus
attgcccaattctacgttgctctat

SEQ ID NO: 183777 - DNA, 25 bp, Saccharomyces pastorianus
tctccaagtgcggaaggtttcttcg

SEQ ID NO: 183778 - DNA, 25 bp, Saccharomyces pastorianus
tattccccgtgggagattctccaag

SEQ ID NO: 183779 - DNA, 25 bp, Saccharomyces pastorianus
ctatccttcccacttgttatggtta

SEQ ID NO: 183780 - DNA, 25 bp, Saccharomyces pastorianus
aacgtatcttcatcttctcaatcgg

SEQ ID NO: 183781 - DNA, 25 bp, Saccharomyces pastorianus
tcatcttctcaatcggcatcatcaa

SEQ ID NO: 183782 - DNA, 25 bp, Saccharomyces pastorianus
tcttcatcttctcaatcggcatcat

SEQ ID NO: 183783 - DNA, 25 bp, Saccharomyces pastorianus
ttcatcttctcaatcggcatcatca

SEQ ID NO: 183784 - DNA, 25 bp, Saccharomyces pastorianus
atcttcatcttctcaatcggcatca

SEQ ID NO: 183785 - DNA, 25 bp, Saccharomyces pastorianus
cttctcaatcggcatcatcaagacc

SEQ ID NO: 183786 - DNA, 25 bp, Saccharomyces pastorianus
catcttctcaatcggcatcatcaag

SEQ ID NO: 183787 - DNA, 25 bp, Saccharomyces pastorianus
tctcaatcggcatcatcaagaccat

SEQ ID NO: 183788 - DNA, 25 bp, Saccharomyces pastorianus
gaacgtatcttcatcttctcaatcg

SEQ ID NO: 183789 - DNA, 25 bp, Saccharomyces pastorianus
gtatcttcatcttctcaatcggcat

SEQ ID NO: 183790 - DNA, 25 bp, Saccharomyces pastorianus
acgtatcttcatcttctcaatcggc

SEQ ID NO: 183791 - DNA, 25 bp, Saccharomyces pastorianus
aagtaccaagaacctgctgttgcct

SEQ ID NO: 183792 - DNA, 25 bp, Saccharomyces pastorianus
ggagttgtcatatgagcagtaccat

SEQ ID NO: 183793 - DNA, 25 bp, Saccharomyces pastorianus
gcagcgcatctgaacgaagctatca

SEQ ID NO: 183794 - DNA, 25 bp, Saccharomyces pastorianus
agatccagcgcttcatcatcgagca

SEQ ID NO: 183795 - DNA, 25 bp, Saccharomyces pastorianus
tacccggatcggaaggctcgcgcga

SEQ ID NO: 183796 - DNA, 25 bp, Saccharomyces pastorianus
gacagcggttggaacaaaagtacca

SEQ ID NO: 183797 - DNA, 25 bp, Saccharomyces pastorianus
cagaacgcgcgtacccggatcggaa

SEQ ID NO: 183798 - DNA, 25 bp, Saccharomyces pastorianus
gaagctatcaacctagacagcggtt

SEQ ID NO: 183799 - DNA, 25 bp, Saccharomyces pastorianus
atgagcagtaccatgcagcgcatct

SEQ ID NO: 183800 - DNA, 25 bp, Saccharomyces pastorianus
tgccttttaacagaacgcgcgtacc

SEQ ID NO: 183801 - DNA, 25 bp, Saccharomyces pastorianus
aagaacctgctgttgccttttaaca

SEQ ID NO: 183802 - DNA, 25 bp, Saccharomyces pastorianus
aaagccaacatcatcgctgcacgtt

SEQ ID NO: 183803 - DNA, 25 bp, Saccharomyces pastorianus
atgctagtagaggtttctgccgcgc

SEQ ID NO: 183804 - DNA, 25 bp, Saccharomyces pastorianus
taaagttccatctaacgccacgttt

SEQ ID NO: 183805 - DNA, 25 bp, Saccharomyces pastorianus
catccggtggccagaatgctagtag

SEQ ID NO: 183806 - DNA, 25 bp, Saccharomyces pastorianus
tgcacgttctgttgcagatgccatc

SEQ ID NO: 183807 - DNA, 25 bp, Saccharomyces pastorianus
atccgtacttcattgggtcccaagg

SEQ ID NO: 183808 - DNA, 25 bp, Saccharomyces pastorianus
attgtgtctcaatactcttcgtttt

SEQ ID NO: 183809 - DNA, 25 bp, Saccharomyces pastorianus
tgcatccacttctttgagttccaag

SEQ ID NO: 183810 - DNA, 25 bp, Saccharomyces pastorianus
gaccggagctctattgggtgctgct

SEQ ID NO: 183811 - DNA, 25 bp, Saccharomyces pastorianus
gcggactcctttcaaagtgctgcga

SEQ ID NO: 183812 - DNA, 25 bp, Saccharomyces pastorianus
aagccggtgatggtaccacttctgt

SEQ ID NO: 183813 - DNA, 25 bp, Saccharomyces pastorianus
tagatttggtgactccaggtctccc

SEQ ID NO: 183814 - DNA, 25 bp, Saccharomyces pastorianus
atgtgccaatagaagatgctgacgg

SEQ ID NO: 183815 - DNA, 25 bp, Saccharomyces pastorianus
caggtctcccgcatatggtgaaata

SEQ ID NO: 183816 - DNA, 25 bp, Saccharomyces pastorianus
aggttcaacggatgcgattccctgg

SEQ ID NO: 183817 - DNA, 25 bp, Saccharomyces pastorianus
tgggccatccatcaaggtaagcaaa

SEQ ID NO: 183818 - DNA, 25 bp, Saccharomyces pastorianus
cccgtcttatcccatatcgtaaatg

SEQ ID NO: 183819 - DNA, 25 bp, Saccharomyces pastorianus
ggaactttgggtcgtgatgccactt

SEQ ID NO: 183820 - DNA, 25 bp, Saccharomyces pastorianus
gattcggccaagttgattttcaata

SEQ ID NO: 183821 - DNA, 25 bp, Saccharomyces pastorianus
caatagggctatcgtcactgaaaaa

SEQ ID NO: 183822 - DNA, 25 bp, Saccharomyces pastorianus
aaggctattgctcaaattgtctcgc

SEQ ID NO: 183823 - DNA, 25 bp, Saccharomyces pastorianus
ggcattcaagtcttgattcggccaa

SEQ ID NO: 183824 - DNA, 25 bp, Saccharomyces pastorianus
ggaagcaaacactagcgcaaatctg

SEQ ID NO: 183825 - DNA, 25 bp, Saccharomyces pastorianus
gtaaccgctaataattttcaacaga

SEQ ID NO: 183826 - DNA, 25 bp, Saccharomyces pastorianus
tttcaacagacgcagaatgaccctt

SEQ ID NO: 183827 - DNA, 25 bp, Saccharomyces pastorianus
gcagaatgacccttcgtataacaga

SEQ ID NO: 183828 - DNA, 25 bp, Saccharomyces pastorianus
gaaatttgttcatgatgtccaatca

SEQ ID NO: 183829 - DNA, 25 bp, Saccharomyces pastorianus
acatgatgacatctggtccggtaga

SEQ ID NO: 183830 - DNA, 25 bp, Saccharomyces pastorianus
gtaactaacgcagacatcaggaaaa

SEQ ID NO: 183831 - DNA, 25 bp, Saccharomyces pastorianus
aaaagcgttctaactgggataacat

SEQ ID NO: 183832 - DNA, 25 bp, Saccharomyces pastorianus
agcgcaaatctgcatttcgacaatg

SEQ ID NO: 183833 - DNA, 25 bp, Saccharomyces pastorianus
acatctggtccggtagaagactttt

SEQ ID NO: 183834 - DNA, 25 bp, Saccharomyces pastorianus
gtccaatcaggaaggtgtacaatat

SEQ ID NO: 183835 - DNA, 25 bp, Saccharomyces pastorianus
actagcatacctagtcgaacacgcc

SEQ ID NO: 183836 - DNA, 25 bp, Saccharomyces pastorianus
gaaactagaacaaccatcactggaa

SEQ ID NO: 183837 - DNA, 25 bp, Saccharomyces pastorianus
ttgaacatgccaaggccatcaatca

SEQ ID NO: 183838 - DNA, 25 bp, Saccharomyces pastorianus
aaccatcactagcatacctagtcga

SEQ ID NO: 183839 - DNA, 25 bp, Saccharomyces pastorianus
gaaggagaagtctgcctacctgggc

SEQ ID NO: 183840 - DNA, 25 bp, Saccharomyces pastorianus
gttgtatccaacgaggcatattctg

SEQ ID NO: 183841 - DNA, 25 bp, Saccharomyces pastorianus
aaggccatcaatcaccatttactat

SEQ ID NO: 183842 - DNA, 25 bp, Saccharomyces pastorianus
ggaatacctagttgaacatgccaag

SEQ ID NO: 183843 - DNA, 25 bp, Saccharomyces pastorianus
tctgccaaactaggccatactgttg

SEQ ID NO: 183844 - DNA, 25 bp, Saccharomyces pastorianus
aactaggccatactgttgtatccaa

SEQ ID NO: 183845 - DNA, 25 bp, Saccharomyces pastorianus
agtctgcctacctgggccatactgt

SEQ ID NO: 183846 - DNA, 25 bp, Saccharomyces pastorianus
gaattcctattataggggtgccgag

SEQ ID NO: 183847 - DNA, 25 bp, Saccharomyces pastorianus
tcatacatttttgatagacttcgta

SEQ ID NO: 183848 - DNA, 25 bp, Saccharomyces pastorianus
ctgttttatggcgcttatgtgtatt

SEQ ID NO: 183849 - DNA, 25 bp, Saccharomyces pastorianus
tactgttttatggcgcttatgtgta

SEQ ID NO: 183850 - DNA, 25 bp, Saccharomyces pastorianus
ttttgatagacttcgtatgtggagt

SEQ ID NO: 183851 - DNA, 25 bp, Saccharomyces pastorianus
ggaattcctattataggggtgccga

SEQ ID NO: 183852 - DNA, 25 bp, Saccharomyces pastorianus
aattcctattataggggtgccgagg

SEQ ID NO: 183853 - DNA, 25 bp, Saccharomyces pastorianus
atttttgatagacttcgtatgtgga

SEQ ID NO: 183854 - DNA, 25 bp, Saccharomyces pastorianus
ttcctattataggggtgccgaggtg

SEQ ID NO: 183855 - DNA, 25 bp, Saccharomyces pastorianus
attcctattataggggtgccgaggt

SEQ ID NO: 183856 - DNA, 25 bp, Saccharomyces pastorianus
gtactgttttatggcgcttatgtgt

SEQ ID NO: 183857 - DNA, 25 bp, Saccharomyces pastorianus
cttctttgaagtttctagtcggaca

SEQ ID NO: 183858 - DNA, 25 bp, Saccharomyces pastorianus
tttctagtcggacaaggtatgagac

SEQ ID NO: 183859 - DNA, 25 bp, Saccharomyces pastorianus
ggaacctcgtctctggcaaaaagaa

SEQ ID NO: 183860 - DNA, 25 bp, Saccharomyces pastorianus
gtctctggcaaaaagaaaacttctt

SEQ ID NO: 183861 - DNA, 25 bp, Saccharomyces pastorianus
caatgacataattgcacagcacaca

SEQ ID NO: 183862 - DNA, 25 bp, Saccharomyces pastorianus
aggacgtataaaggcaggcgaattt

SEQ ID NO: 183863 - DNA, 25 bp, Saccharomyces pastorianus
agcacacagatgaagctttcatacg

SEQ ID NO: 183864 - DNA, 25 bp, Saccharomyces pastorianus
ggtatgagacaaagccaaggacgta

SEQ ID NO: 183865 - DNA, 25 bp, Saccharomyces pastorianus
taaaggcaggcgaatttgagaaaaa

SEQ ID NO: 183866 - DNA, 25 bp, Saccharomyces pastorianus
atacggaacctcgtctctggcaaaa

SEQ ID NO: 183867 - DNA, 25 bp, Saccharomyces pastorianus
gaagctttcatacggaacctcgtct

SEQ ID NO: 183868 - DNA, 25 bp, Saccharomyces pastorianus
gctgcagcaagcactaaggagcatt

SEQ ID NO: 183869 - DNA, 25 bp, Saccharomyces pastorianus
atttgtcaattgttgcttgctcgag

SEQ ID NO: 183870 - DNA, 25 bp, Saccharomyces pastorianus
acatgccctgaatcggagttccatt

SEQ ID NO: 183871 - DNA, 25 bp, Saccharomyces pastorianus
atttgattaggcacacatgccctga

SEQ ID NO: 183872 - DNA, 25 bp, Saccharomyces pastorianus
ggagttaccagacatcaacgacgaa

SEQ ID NO: 183873 - DNA, 25 bp, Saccharomyces pastorianus
attgttgcttgctcgagcttgaaga

SEQ ID NO: 183874 - DNA, 25 bp, Saccharomyces pastorianus
caacgacgaaactgactgtgacatt

SEQ ID NO: 183875 - DNA, 25 bp, Saccharomyces pastorianus
gtagaatctacaaaagctgcagcaa

SEQ ID NO: 183876 - DNA, 25 bp, Saccharomyces pastorianus
gagggattccattaaatgacgacga

SEQ ID NO: 183877 - DNA, 25 bp, Saccharomyces pastorianus
tggagtctcaattcagggatctgga

SEQ ID NO: 183878 - DNA, 25 bp, Saccharomyces pastorianus
ctgtgacattgttcccttagatttc

SEQ ID NO: 183879 - DNA, 25 bp, Saccharomyces pastorianus
atttctatatactaatattacgatt

SEQ ID NO: 183880 - DNA, 25 bp, Saccharomyces pastorianus
atatttctatatactaatattacga

SEQ ID NO: 183881 - DNA, 25 bp, Saccharomyces pastorianus
tatttctatatactaatattacgat

SEQ ID NO: 183882 - DNA, 25 bp, Saccharomyces pastorianus
gaatctatatttctatatactaata

SEQ ID NO: 183883 - DNA, 25 bp, Saccharomyces pastorianus
ttctatatactaatattacgattat

SEQ ID NO: 183884 - DNA, 25 bp, Saccharomyces pastorianus
tggaatctatatttctatatactaa

SEQ ID NO: 183885 - DNA, 25 bp, Saccharomyces pastorianus
atggaatctatatttctatatacta

SEQ ID NO: 183886 - DNA, 25 bp, Saccharomyces pastorianus
aatggaatctatatttctatatact

SEQ ID NO: 183887 - DNA, 25 bp, Saccharomyces pastorianus
ctatatactaatattacgattattc

SEQ ID NO: 183888 - DNA, 25 bp, Saccharomyces pastorianus
ggaatctatatttctatatactaat

SEQ ID NO: 183889 - DNA, 25 bp, Saccharomyces pastorianus
tttctatatactaatattacgatta

SEQ ID NO: 183890 - DNA, 25 bp, Saccharomyces pastorianus
acatccttggtttcatccgttgcgg

SEQ ID NO: 183891 - DNA, 25 bp, Saccharomyces pastorianus
ttcacaggcgctttgatcttgttta

SEQ ID NO: 183892 - DNA, 25 bp, Saccharomyces pastorianus
ggtgtatagaggttttcccctgaag

SEQ ID NO: 183893 - DNA, 25 bp, Saccharomyces pastorianus
ttgtcctctgatgttttcccattga

SEQ ID NO: 183894 - DNA, 25 bp, Saccharomyces pastorianus
aagttccttattactttgctggaca

SEQ ID NO: 183895 - DNA, 25 bp, Saccharomyces pastorianus
tgctggacaattgatcggtgccttc

SEQ ID NO: 183896 - DNA, 25 bp, Saccharomyces pastorianus
gaatccgtctattacattagccaat

SEQ ID NO: 183897 - DNA, 25 bp, Saccharomyces pastorianus
tgcgctggtggtagtgccatctcag

SEQ ID NO: 183898 - DNA, 25 bp, Saccharomyces pastorianus
cgttgcgggcggtacctttgatgat

SEQ ID NO: 183899 - DNA, 25 bp, Saccharomyces pastorianus
gcaggaacatttgcgctgaccgatc

SEQ ID NO: 183900 - DNA, 25 bp, Saccharomyces pastorianus
atccttatacgtgtttgtcctctga

SEQ ID NO: 183901 - DNA, 25 bp, Saccharomyces pastorianus
ctgactttgtttctggcacacctat

SEQ ID NO: 183902 - DNA, 25 bp, Saccharomyces pastorianus
aaatatggatacaatttggcaccct

SEQ ID NO: 183903 - DNA, 25 bp, Saccharomyces pastorianus
tttcactgactttgtttctggcaca

SEQ ID NO: 183904 - DNA, 25 bp, Saccharomyces pastorianus
atacaatttggcaccctacatgttt

SEQ ID NO: 183905 - DNA, 25 bp, Saccharomyces pastorianus
ctttcactgactttgtttctggcac

SEQ ID NO: 183906 - DNA, 25 bp, Saccharomyces pastorianus
ttcactgactttgtttctggcacac

SEQ ID NO: 183907 - DNA, 25 bp, Saccharomyces pastorianus
actttcactgactttgtttctggca

SEQ ID NO: 183908 - DNA, 25 bp, Saccharomyces pastorianus
aatatggatacaatttggcacccta

SEQ ID NO: 183909 - DNA, 25 bp, Saccharomyces pastorianus
gtttctggcacacctattgtaagga

SEQ ID NO: 183910 - DNA, 25 bp, Saccharomyces pastorianus
actgactttgtttctggcacaccta

SEQ ID NO: 183911 - DNA, 25 bp, Saccharomyces pastorianus
tcactgactttgtttctggcacacc

SEQ ID NO: 183912 - DNA, 25 bp, Saccharomyces pastorianus
gtttggcgctcgttatcaaccacaa

SEQ ID NO: 183913 - DNA, 25 bp, Saccharomyces pastorianus
tcctgaacagcacccaaatgacgat

SEQ ID NO: 183914 - DNA, 25 bp, Saccharomyces pastorianus
atctcagcctcaagcgcaaactcaa

SEQ ID NO: 183915 - DNA, 25 bp, Saccharomyces pastorianus
tctgctgctttaagaactcctgaac

SEQ ID NO: 183916 - DNA, 25 bp, Saccharomyces pastorianus
aagaagccaaatctccacggatacg

SEQ ID NO: 183917 - DNA, 25 bp, Saccharomyces pastorianus
gcaacagctacgtgcaacaggccaa

SEQ ID NO: 183918 - DNA, 25 bp, Saccharomyces pastorianus
ggcagatatgcgcaattctcaatat

SEQ ID NO: 183919 - DNA, 25 bp, Saccharomyces pastorianus
taccagcatcaaacccagcagaaat

SEQ ID NO: 183920 - DNA, 25 bp, Saccharomyces pastorianus
gctccaaatgcaacagctccaacag

SEQ ID NO: 183921 - DNA, 25 bp, Saccharomyces pastorianus
agttagaccctacttcttatgaagc

SEQ ID NO: 183922 - DNA, 25 bp, Saccharomyces pastorianus
aactcaatctcagcagtttggcgct

SEQ ID NO: 183923 - DNA, 25 bp, Saccharomyces pastorianus
aaatctcagaacataaacctttata

SEQ ID NO: 183924 - DNA, 25 bp, Saccharomyces pastorianus
aaatactctaatacttataaagctg

SEQ ID NO: 183925 - DNA, 25 bp, Saccharomyces pastorianus
aaggagatggtcatatcggtgctaa

SEQ ID NO: 183926 - DNA, 25 bp, Saccharomyces pastorianus
agctgtaagtttaaatttggattct

SEQ ID NO: 183927 - DNA, 25 bp, Saccharomyces pastorianus
taaacaatcggcaagtaacttttat

SEQ ID NO: 183928 - DNA, 25 bp, Saccharomyces pastorianus
gagatggtcatatcggtgctaaata

SEQ ID NO: 183929 - DNA, 25 bp, Saccharomyces pastorianus
tattaggttattatttagcaggttt

SEQ ID NO: 183930 - DNA, 25 bp, Saccharomyces pastorianus
taactaataataaacaatcggcaag

SEQ ID NO: 183931 - DNA, 25 bp, Saccharomyces pastorianus
tagcaggtttaattgaaggagatgg

SEQ ID NO: 183932 - DNA, 25 bp, Saccharomyces pastorianus
cggtgctaaatatattactattgct

SEQ ID NO: 183933 - DNA, 25 bp, Saccharomyces pastorianus
aaatttggattctaaagcagctata

SEQ ID NO: 183934 - DNA, 25 bp, Saccharomyces pastorianus
tctccgggcaagaaacagataacat

SEQ ID NO: 183935 - DNA, 25 bp, Saccharomyces pastorianus
tggtcctggacctgaaataaataag

SEQ ID NO: 183936 - DNA, 25 bp, Saccharomyces pastorianus
tacgaattcatcgaagaggccaatt

SEQ ID NO: 183937 - DNA, 25 bp, Saccharomyces pastorianus
gaagaggccaattgaaaagtatgac

SEQ ID NO: 183938 - DNA, 25 bp, Saccharomyces pastorianus
caaatctaattgatggatctacgaa

SEQ ID NO: 183939 - DNA, 25 bp, Saccharomyces pastorianus
atgactggtcctggacctgaaataa

SEQ ID NO: 183940 - DNA, 25 bp, Saccharomyces pastorianus
gatggatctacgaattcatcgaaga

SEQ ID NO: 183941 - DNA, 25 bp, Saccharomyces pastorianus
aataaggaggagcaccccagttctc

SEQ ID NO: 183942 - DNA, 25 bp, Saccharomyces pastorianus
gcaccccagttctccgggcaagaaa

SEQ ID NO: 183943 - DNA, 25 bp, Saccharomyces pastorianus
tataatagtatacccaagaatgcaa

SEQ ID NO: 183944 - DNA, 25 bp, Saccharomyces pastorianus
gtatacccaagaatgcaaatctaat

SEQ ID NO: 183945 - DNA, 25 bp, Saccharomyces pastorianus
gagcaatctttacgtgtccaactag

SEQ ID NO: 183946 - DNA, 25 bp, Saccharomyces pastorianus
atccgtgttgcgttatggtttacca

SEQ ID NO: 183947 - DNA, 25 bp, Saccharomyces pastorianus
ctacattctgaacacttgaccactg

SEQ ID NO: 183948 - DNA, 25 bp, Saccharomyces pastorianus
gtccaagagttcacagcggctgcaa

SEQ ID NO: 183949 - DNA, 25 bp, Saccharomyces pastorianus
tgtaccagcatctgcaggtgtaatt

SEQ ID NO: 183950 - DNA, 25 bp, Saccharomyces pastorianus
aggaacatgactctgctgcaagttt

SEQ ID NO: 183951 - DNA, 25 bp, Saccharomyces pastorianus
gttccaccaaagaacctctctagat

SEQ ID NO: 183952 - DNA, 25 bp, Saccharomyces pastorianus
gaagtttatccctcgtgaattcaat

SEQ ID NO: 183953 - DNA, 25 bp, Saccharomyces pastorianus
acacttgaccactgttcttgtagca

SEQ ID NO: 183954 - DNA, 25 bp, Saccharomyces pastorianus
agagtctacgtggaatccgtgttgc

SEQ ID NO: 183955 - DNA, 25 bp, Saccharomyces pastorianus
ggtttaccacctcattttaacatca

SEQ ID NO: 183956 - DNA, 25 bp, Saccharomyces pastorianus
attccttatttggtcgactgtgtcg

SEQ ID NO: 183957 - DNA, 25 bp, Saccharomyces pastorianus
tcccgcagttgcttgatgacatcag

SEQ ID NO: 183958 - DNA, 25 bp, Saccharomyces pastorianus
cggtgccgatgaactgtttgattat

SEQ ID NO: 183959 - DNA, 25 bp, Saccharomyces pastorianus
agatcattgtcgtcgcttctcagaa

SEQ ID NO: 183960 - DNA, 25 bp, Saccharomyces pastorianus
gaaggccgccattagattagtcaag

SEQ ID NO: 183961 - DNA, 25 bp, Saccharomyces pastorianus
ggttgtatgacgtcccgcagttgct

SEQ ID NO: 183962 - DNA, 25 bp, Saccharomyces pastorianus
gccgtaggccaactactgattcagt

SEQ ID NO: 183963 - DNA, 25 bp, Saccharomyces pastorianus
ccatcatatcccagtcaaggtctat

SEQ ID NO: 183964 - DNA, 25 bp, Saccharomyces pastorianus
gtcaccattgccaaaacaagcctat

SEQ ID NO: 183965 - DNA, 25 bp, Saccharomyces pastorianus
attcacttttccagctgatcttgag

SEQ ID NO: 183966 - DNA, 25 bp, Saccharomyces pastorianus
tggaagccttctgtgccacaaaggg

SEQ ID NO: 183967 - DNA, 25 bp, Saccharomyces pastorianus
tctagcgggatcgaaccgctgatcc

SEQ ID NO: 183968 - DNA, 25 bp, Saccharomyces pastorianus
atggtctctagcgggatcgaaccgc

SEQ ID NO: 183969 - DNA, 25 bp, Saccharomyces pastorianus
cgaaccgctgatccccgcgttatta

SEQ ID NO: 183970 - DNA, 25 bp, Saccharomyces pastorianus
gtctctagcgggatcgaaccgctga

SEQ ID NO: 183971 - DNA, 25 bp, Saccharomyces pastorianus
tctctagcgggatcgaaccgctgat

SEQ ID NO: 183972 - DNA, 25 bp, Saccharomyces pastorianus
ctctagcgggatcgaaccgctgatc

SEQ ID NO: 183973 - DNA, 25 bp, Saccharomyces pastorianus
ggtctctagcgggatcgaaccgctg

SEQ ID NO: 183974 - DNA, 25 bp, Saccharomyces pastorianus
ggatcgaaccgctgatccccgcgtt

SEQ ID NO: 183975 - DNA, 25 bp, Saccharomyces pastorianus
tagcgggatcgaaccgctgatcccc

SEQ ID NO: 183976 - DNA, 25 bp, Saccharomyces pastorianus
atcgaaccgctgatccccgcgttat

SEQ ID NO: 183977 - DNA, 25 bp, Saccharomyces pastorianus
gctgatccccgcgttattagcacgg

SEQ ID NO: 183978 - DNA, 25 bp, Saccharomyces pastorianus
gacgagaagattaccagtcctggat

SEQ ID NO: 183979 - DNA, 25 bp, Saccharomyces pastorianus
cccaagagtttcttactggtggttg

SEQ ID NO: 183980 - DNA, 25 bp, Saccharomyces pastorianus
accagtcctggatgttcgtgaatgt

SEQ ID NO: 183981 - DNA, 25 bp, Saccharomyces pastorianus
gctatgcaatatttcagatacccca

SEQ ID NO: 183982 - DNA, 25 bp, Saccharomyces pastorianus
gaatatcttcatttgcagctatgca

SEQ ID NO: 183983 - DNA, 25 bp, Saccharomyces pastorianus
tcttactggtggttggattttcttt

SEQ ID NO: 183984 - DNA, 25 bp, Saccharomyces pastorianus
cagataccccattttacccaagagt

SEQ ID NO: 183985 - DNA, 25 bp, Saccharomyces pastorianus
tattgcgtcatcagcgactccgcgc

SEQ ID NO: 183986 - DNA, 25 bp, Saccharomyces pastorianus
gtggttggattttctttaagacgag

SEQ ID NO: 183987 - DNA, 25 bp, Saccharomyces pastorianus
tgttcgtgaatgtgcctattgcgtc

SEQ ID NO: 183988 - DNA, 25 bp, Saccharomyces pastorianus
aatgtgcctattgcgtcatcagcga

SEQ ID NO: 183989 - DNA, 25 bp, Saccharomyces pastorianus
cttttttacctcaccagaggatact

SEQ ID NO: 183990 - DNA, 25 bp, Saccharomyces pastorianus
gagtggagttttccgtgtcctggaa

SEQ ID NO: 183991 - DNA, 25 bp, Saccharomyces pastorianus
ctataatgagtggagttttccgtgt

SEQ ID NO: 183992 - DNA, 25 bp, Saccharomyces pastorianus
ataatgagtggagttttccgtgtcc

SEQ ID NO: 183993 - DNA, 25 bp, Saccharomyces pastorianus
tggagttttccgtgtcctggaacgt

SEQ ID NO: 183994 - DNA, 25 bp, Saccharomyces pastorianus
gtggagttttccgtgtcctggaacg

SEQ ID NO: 183995 - DNA, 25 bp, Saccharomyces pastorianus
ttctcttttttacctcaccagagga

SEQ ID NO: 183996 - DNA, 25 bp, Saccharomyces pastorianus
aatgagtggagttttccgtgtcctg

SEQ ID NO: 183997 - DNA, 25 bp, Saccharomyces pastorianus
tataatgagtggagttttccgtgtc

SEQ ID NO: 183998 - DNA, 25 bp, Saccharomyces pastorianus
tgagtggagttttccgtgtcctgga

SEQ ID NO: 183999 - DNA, 25 bp, Saccharomyces pastorianus
atgagtggagttttccgtgtcctgg

SEQ ID NO: 184000 - DNA, 25 bp, Saccharomyces pastorianus
cttgaaaacaaggacgttcagaatt

SEQ ID NO: 184001 - DNA, 25 bp, Saccharomyces pastorianus
tgatatggatagcaactctcgaaat

SEQ ID NO: 184002 - DNA, 25 bp, Saccharomyces pastorianus
caaggacgttcagaattgttagatt

SEQ ID NO: 184003 - DNA, 25 bp, Saccharomyces pastorianus
ggacgttcagaattgttagattatt

SEQ ID NO: 184004 - DNA, 25 bp, Saccharomyces pastorianus
actctcgaaattacttgaaaacaag

SEQ ID NO: 184005 - DNA, 25 bp, Saccharomyces pastorianus
gcaactctcgaaattacttgaaaac

SEQ ID NO: 184006 - DNA, 25 bp, Saccharomyces pastorianus
gatagcaactctcgaaattacttga

SEQ ID NO: 184007 - DNA, 25 bp, Saccharomyces pastorianus
tatggatagcaactctcgaaattac

SEQ ID NO: 184008 - DNA, 25 bp, Saccharomyces pastorianus
tggatagcaactctcgaaattactt

SEQ ID NO: 184009 - DNA, 25 bp, Saccharomyces pastorianus
tagcaactctcgaaattacttgaaa

SEQ ID NO: 184010 - DNA, 25 bp, Saccharomyces pastorianus
gatatggatagcaactctcgaaatt

SEQ ID NO: 184011 - DNA, 25 bp, Saccharomyces pastorianus
cggaagaagcatttctatctcttga

SEQ ID NO: 184012 - DNA, 25 bp, Saccharomyces pastorianus
gcttccgcggaagaagcatttctat

SEQ ID NO: 184013 - DNA, 25 bp, Saccharomyces pastorianus
ccgcggaagaagcatttctatctct

SEQ ID NO: 184014 - DNA, 25 bp, Saccharomyces pastorianus
cgcggaagaagcatttctatctctt

SEQ ID NO: 184015 - DNA, 25 bp, Saccharomyces pastorianus
taagcccatattcagtctgctctaa

SEQ ID NO: 184016 - DNA, 25 bp, Saccharomyces pastorianus
atctcttgaaatccgtacaagatat

SEQ ID NO: 184017 - DNA, 25 bp, Saccharomyces pastorianus
tatctcttgaaatccgtacaagata

SEQ ID NO: 184018 - DNA, 25 bp, Saccharomyces pastorianus
ttccgcggaagaagcatttctatct

SEQ ID NO: 184019 - DNA, 25 bp, Saccharomyces pastorianus
ctaagcccatattcagtctgctcta

SEQ ID NO: 184020 - DNA, 25 bp, Saccharomyces pastorianus
tccgcggaagaagcatttctatctc

SEQ ID NO: 184021 - DNA, 25 bp, Saccharomyces pastorianus
cttccgcggaagaagcatttctatc

SEQ ID NO: 184022 - DNA, 25 bp, Saccharomyces pastorianus
agcctgggaacgtagattcatgcaa

SEQ ID NO: 184023 - DNA, 25 bp, Saccharomyces pastorianus
ttgggcctctcttcgcaaaataacg

SEQ ID NO: 184024 - DNA, 25 bp, Saccharomyces pastorianus
ctgttctcatgggtcagcctgggaa

SEQ ID NO: 184025 - DNA, 25 bp, Saccharomyces pastorianus
gacctttgccagttgaaatctttta

SEQ ID NO: 184026 - DNA, 25 bp, Saccharomyces pastorianus
tttgctgacactaccgacaataccg

SEQ ID NO: 184027 - DNA, 25 bp, Saccharomyces pastorianus
caagagttaaagtcgtacctgcacg

SEQ ID NO: 184028 - DNA, 25 bp, Saccharomyces pastorianus
atgacgttgacgtgtttgctgacac

SEQ ID NO: 184029 - DNA, 25 bp, Saccharomyces pastorianus
ttcaagtatccattgcctaagccaa

SEQ ID NO: 184030 - DNA, 25 bp, Saccharomyces pastorianus
taccgccctcttgaattattcgcaa

SEQ ID NO: 184031 - DNA, 25 bp, Saccharomyces pastorianus
gaaagacatgttgggcctctcttcg

SEQ ID NO: 184032 - DNA, 25 bp, Saccharomyces pastorianus
ttggcagttcctaagctattttttg

SEQ ID NO: 184033 - DNA, 25 bp, Saccharomyces pastorianus
gatgtttttcgttcgccaagtcaat

SEQ ID NO: 184034 - DNA, 25 bp, Saccharomyces pastorianus
ggtaacttgcagtatcttcttcgct

SEQ ID NO: 184035 - DNA, 25 bp, Saccharomyces pastorianus
tagaggttccttagccactgttatg

SEQ ID NO: 184036 - DNA, 25 bp, Saccharomyces pastorianus
caatcgctaaccctttcaattttgg

SEQ ID NO: 184037 - DNA, 25 bp, Saccharomyces pastorianus
agttcctggtgctattctgctaata

SEQ ID NO: 184038 - DNA, 25 bp, Saccharomyces pastorianus
ttcttcgctgcattgggtttcctat

SEQ ID NO: 184039 - DNA, 25 bp, Saccharomyces pastorianus
gatattgactccacttctagttcct

SEQ ID NO: 184040 - DNA, 25 bp, Saccharomyces pastorianus
gtcatctgttgttatccattcgcta

SEQ ID NO: 184041 - DNA, 25 bp, Saccharomyces pastorianus
gtcggctcttatacatctatgggca

SEQ ID NO: 184042 - DNA, 25 bp, Saccharomyces pastorianus
ccattcgctattgcgcgcactgaaa

SEQ ID NO: 184043 - DNA, 25 bp, Saccharomyces pastorianus
attattcgggtttgtcggctcttat

SEQ ID NO: 184044 - DNA, 25 bp, Saccharomyces pastorianus
gaaaccgtactataagctttatagt

SEQ ID NO: 184045 - DNA, 25 bp, Saccharomyces pastorianus
gaatggctctctggacgtgacaaga

SEQ ID NO: 184046 - DNA, 25 bp, Saccharomyces pastorianus
aatgcatacttattgtactgtgaaa

SEQ ID NO: 184047 - DNA, 25 bp, Saccharomyces pastorianus
aaaagtagctgattctaaaggaggt

SEQ ID NO: 184048 - DNA, 25 bp, Saccharomyces pastorianus
gaaaggattaggcagaatggctctc

SEQ ID NO: 184049 - DNA, 25 bp, Saccharomyces pastorianus
aagctttatagtgaggacagagaaa

SEQ ID NO: 184050 - DNA, 25 bp, Saccharomyces pastorianus
agaggcccacaaatgcatacttatt

SEQ ID NO: 184051 - DNA, 25 bp, Saccharomyces pastorianus
ggatcatctacaaaagtagctgatt

SEQ ID NO: 184052 - DNA, 25 bp, Saccharomyces pastorianus
aacgaggaaggatcatctacaaaag

SEQ ID NO: 184053 - DNA, 25 bp, Saccharomyces pastorianus
tctggcagaaggttggaaaaatctt

SEQ ID NO: 184054 - DNA, 25 bp, Saccharomyces pastorianus
ggacgtgacaagagatctggcagaa

SEQ ID NO: 184055 - DNA, 25 bp, Saccharomyces pastorianus
cagccgctaaaaagacttccacttc

SEQ ID NO: 184056 - DNA, 25 bp, Saccharomyces pastorianus
ccagccgctaaaaagacttccactt

SEQ ID NO: 184057 - DNA, 25 bp, Saccharomyces pastorianus
gccgctaaaaagacttccacttcca

SEQ ID NO: 184058 - DNA, 25 bp, Saccharomyces pastorianus
gctaaaaagacttccacttccactg

SEQ ID NO: 184059 - DNA, 25 bp, Saccharomyces pastorianus
taaaaagacttccacttccactgat

SEQ ID NO: 184060 - DNA, 25 bp, Saccharomyces pastorianus
gctgaaaagaaaccagccgctaaaa

SEQ ID NO: 184061 - DNA, 25 bp, Saccharomyces pastorianus
ccagctgaaaagaaaccagccgcta

SEQ ID NO: 184062 - DNA, 25 bp, Saccharomyces pastorianus
aaaaagacttccacttccactgatg

SEQ ID NO: 184063 - DNA, 25 bp, Saccharomyces pastorianus
aaaagacttccacttccactgatgg

SEQ ID NO: 184064 - DNA, 25 bp, Saccharomyces pastorianus
cgctaaaaagacttccacttccact

SEQ ID NO: 184065 - DNA, 25 bp, Saccharomyces pastorianus
ctaaaaagacttccacttccactga

SEQ ID NO: 184066 - DNA, 25 bp, Saccharomyces pastorianus
accttcacttctactgatatgtcat

SEQ ID NO: 184067 - DNA, 25 bp, Saccharomyces pastorianus
acttctactgatatgtcatacgcac

SEQ ID NO: 184068 - DNA, 25 bp, Saccharomyces pastorianus
ccttcacttctactgatatgtcata

SEQ ID NO: 184069 - DNA, 25 bp, Saccharomyces pastorianus
gttaccctactttcatattccacac

SEQ ID NO: 184070 - DNA, 25 bp, Saccharomyces pastorianus
ctcaccttcacttctactgatatgt

SEQ ID NO: 184071 - DNA, 25 bp, Saccharomyces pastorianus
cactctcaagttaccctactttcat

SEQ ID NO: 184072 - DNA, 25 bp, Saccharomyces pastorianus
ttcacttctactgatatgtcatacg

SEQ ID NO: 184073 - DNA, 25 bp, Saccharomyces pastorianus
agttaccctactttcatattccaca

SEQ ID NO: 184074 - DNA, 25 bp, Saccharomyces pastorianus
cacttctactgatatgtcatacgca

SEQ ID NO: 184075 - DNA, 25 bp, Saccharomyces pastorianus
ttctactgatatgtcatacgcacac

SEQ ID NO: 184076 - DNA, 25 bp, Saccharomyces pastorianus
tcacttctactgatatgtcatacgc

SEQ ID NO: 184077 - DNA, 25 bp, Saccharomyces pastorianus
aactctaccggtgcagaattaagat

SEQ ID NO: 184078 - DNA, 25 bp, Saccharomyces pastorianus
aggtggctactgaaaaggatttcct

SEQ ID NO: 184079 - DNA, 25 bp, Saccharomyces pastorianus
cagactgtgtccaaactctaccggt

SEQ ID NO: 184080 - DNA, 25 bp, Saccharomyces pastorianus
gtggcatcagatgggaacttatctc

SEQ ID NO: 184081 - DNA, 25 bp, Saccharomyces pastorianus
gaacttatctccagactgtgtccaa

SEQ ID NO: 184082 - DNA, 25 bp, Saccharomyces pastorianus
agatctgtttgcacagaagccggta

SEQ ID NO: 184083 - DNA, 25 bp, Saccharomyces pastorianus
gccggtatgtttgccattagagcaa

SEQ ID NO: 184084 - DNA, 25 bp, Saccharomyces pastorianus
aaggatttcctgaaggctgttgata

SEQ ID NO: 184085 - DNA, 25 bp, Saccharomyces pastorianus
tcctgaaggctgttgataaagttat

SEQ ID NO: 184086 - DNA, 25 bp, Saccharomyces pastorianus
cagaagccggtatgtttgccattag

SEQ ID NO: 184087 - DNA, 25 bp, Saccharomyces pastorianus
gttattagcggatacaagaagttta

SEQ ID NO: 184088 - DNA, 25 bp, Saccharomyces pastorianus
cgtgtcggttgttccatattaacaa

SEQ ID NO: 184089 - DNA, 25 bp, Saccharomyces pastorianus
actgaaggcgtgtgaactctcctat

SEQ ID NO: 184090 - DNA, 25 bp, Saccharomyces pastorianus
gaaggcgtgtgaactctcctatagc

SEQ ID NO: 184091 - DNA, 25 bp, Saccharomyces pastorianus
atagcccctattctcacttccgtgt

SEQ ID NO: 184092 - DNA, 25 bp, Saccharomyces pastorianus
aacgatgttatcttcactggtgcta

SEQ ID NO: 184093 - DNA, 25 bp, Saccharomyces pastorianus
gtcggttgttccatattaacaaata

SEQ ID NO: 184094 - DNA, 25 bp, Saccharomyces pastorianus
tgtgaactctcctatagcccctatt

SEQ ID NO: 184095 - DNA, 25 bp, Saccharomyces pastorianus
gttatcttcactggtgctaatgtcg

SEQ ID NO: 184096 - DNA, 25 bp, Saccharomyces pastorianus
gctacagtaattgtatatgtgcaga

SEQ ID NO: 184097 - DNA, 25 bp, Saccharomyces pastorianus
ggcactgaaggcgtgtgaactctcc

SEQ ID NO: 184098 - DNA, 25 bp, Saccharomyces pastorianus
gaagccttaaaaagggcggcactga

SEQ ID NO: 184099 - DNA, 25 bp, Saccharomyces pastorianus
gtaaacttgccagacttcaattcta

SEQ ID NO: 184100 - DNA, 25 bp, Saccharomyces pastorianus
tgatggtggcggagataaccatgaa

SEQ ID NO: 184101 - DNA, 25 bp, Saccharomyces pastorianus
gaaatctctagatgattctacagag

SEQ ID NO: 184102 - DNA, 25 bp, Saccharomyces pastorianus
ggcgccactatggagaatctgtcct

SEQ ID NO: 184103 - DNA, 25 bp, Saccharomyces pastorianus
gaatctgtccttaaacgaccgtgat

SEQ ID NO: 184104 - DNA, 25 bp, Saccharomyces pastorianus
taccaattgaagaggctgagaaact

SEQ ID NO: 184105 - DNA, 25 bp, Saccharomyces pastorianus
gtccttaaacgaccgtgatggtggc

SEQ ID NO: 184106 - DNA, 25 bp, Saccharomyces pastorianus
aagaggctgagaaacttttggaagt

SEQ ID NO: 184107 - DNA, 25 bp, Saccharomyces pastorianus
gagacgattcaattgaaatctctag

SEQ ID NO: 184108 - DNA, 25 bp, Saccharomyces pastorianus
gccagacttcaattctaaagatcca

SEQ ID NO: 184109 - DNA, 25 bp, Saccharomyces pastorianus
gaacaggaccatgaaggcgccacta

SEQ ID NO: 184110 - DNA, 25 bp, Saccharomyces pastorianus
aaggcccgttatcaagagtgccgcc

SEQ ID NO: 184111 - DNA, 25 bp, Saccharomyces pastorianus
gttctgctcttaattattgccatga

SEQ ID NO: 184112 - DNA, 25 bp, Saccharomyces pastorianus
atgagcacggcatctaccactgtga

SEQ ID NO: 184113 - DNA, 25 bp, Saccharomyces pastorianus
agaagataacgttttcctatgcgat

SEQ ID NO: 184114 - DNA, 25 bp, Saccharomyces pastorianus
aaatcctaccgctttccgatgactt

SEQ ID NO: 184115 - DNA, 25 bp, Saccharomyces pastorianus
gattttggtctatccactacttcca

SEQ ID NO: 184116 - DNA, 25 bp, Saccharomyces pastorianus
attggtagctcgtattatatgcccc

SEQ ID NO: 184117 - DNA, 25 bp, Saccharomyces pastorianus
gaaatccctggctgaaggctgacaa

SEQ ID NO: 184118 - DNA, 25 bp, Saccharomyces pastorianus
aggtttgtccctcatgtaatggcga

SEQ ID NO: 184119 - DNA, 25 bp, Saccharomyces pastorianus
gcctctttccaggtctgtttatgaa

SEQ ID NO: 184120 - DNA, 25 bp, Saccharomyces pastorianus
gttagttctatgacaagcttcacca

SEQ ID NO: 184121 - DNA, 25 bp, Saccharomyces pastorianus
ggagaggtcctgcatatcaacgtca

SEQ ID NO: 184122 - DNA, 25 bp, Saccharomyces pastorianus
gaaagggagaggtcctgcatatcaa

SEQ ID NO: 184123 - DNA, 25 bp, Saccharomyces pastorianus
gggagaggtcctgcatatcaacgtc

SEQ ID NO: 184124 - DNA, 25 bp, Saccharomyces pastorianus
aacgagaaagggagaggtcctgcat

SEQ ID NO: 184125 - DNA, 25 bp, Saccharomyces pastorianus
aagggagaggtcctgcatatcaacg

SEQ ID NO: 184126 - DNA, 25 bp, Saccharomyces pastorianus
gagaggtcctgcatatcaacgtcat

SEQ ID NO: 184127 - DNA, 25 bp, Saccharomyces pastorianus
gagatgttaaaaaaggctctttggt

SEQ ID NO: 184128 - DNA, 25 bp, Saccharomyces pastorianus
agaggtcctgcatatcaacgtcatt

SEQ ID NO: 184129 - DNA, 25 bp, Saccharomyces pastorianus
ccgagatgttaaaaaaggctctttg

SEQ ID NO: 184130 - DNA, 25 bp, Saccharomyces pastorianus
aaagggagaggtcctgcatatcaac

SEQ ID NO: 184131 - DNA, 25 bp, Saccharomyces pastorianus
gagaaagggagaggtcctgcatatc

SEQ ID NO: 184132 - DNA, 25 bp, Saccharomyces pastorianus
aaggagaggagcttcttccagggaa

SEQ ID NO: 184133 - DNA, 25 bp, Saccharomyces pastorianus
ttcttccagggaaactgaggctaag

SEQ ID NO: 184134 - DNA, 25 bp, Saccharomyces pastorianus
cctcaaggagaggagcttcttccag

SEQ ID NO: 184135 - DNA, 25 bp, Saccharomyces pastorianus
ccagggaaactgaggctaagaagaa

SEQ ID NO: 184136 - DNA, 25 bp, Saccharomyces pastorianus
gagaggagcttcttccagggaaact

SEQ ID NO: 184137 - DNA, 25 bp, Saccharomyces pastorianus
gcttcttccagggaaactgaggcta

SEQ ID NO: 184138 - DNA, 25 bp, Saccharomyces pastorianus
gaggagcttcttccagggaaactga

SEQ ID NO: 184139 - DNA, 25 bp, Saccharomyces pastorianus
ttgggtaccaccctcaaggagagga

SEQ ID NO: 184140 - DNA, 25 bp, Saccharomyces pastorianus
atcttgggtaccaccctcaaggaga

SEQ ID NO: 184141 - DNA, 25 bp, Saccharomyces pastorianus
gtaccaccctcaaggagaggagctt

SEQ ID NO: 184142 - DNA, 25 bp, Saccharomyces pastorianus
gagcttcttccagggaaactgaggc

SEQ ID NO: 184143 - DNA, 25 bp, Saccharomyces pastorianus
tttttcctcccacggcaaactgcaa

SEQ ID NO: 184144 - DNA, 25 bp, Saccharomyces pastorianus
gcaagagcagatcgcttcatacgtt

SEQ ID NO: 184145 - DNA, 25 bp, Saccharomyces pastorianus
tcccacggcaaactgcaagagcaga

SEQ ID NO: 184146 - DNA, 25 bp, Saccharomyces pastorianus
taaaggtgttagtcatctcgtttct

SEQ ID NO: 184147 - DNA, 25 bp, Saccharomyces pastorianus
agctggaagttggaaactcgcgcaa

SEQ ID NO: 184148 - DNA, 25 bp, Saccharomyces pastorianus
gtcatctcgtttctttttctaatgg

SEQ ID NO: 184149 - DNA, 25 bp, Saccharomyces pastorianus
agatcgcttcatacgttagctggaa

SEQ ID NO: 184150 - DNA, 25 bp, Saccharomyces pastorianus
ttttctaatggtcgcctttttgcct

SEQ ID NO: 184151 - DNA, 25 bp, Saccharomyces pastorianus
cccgcgccttctcgaagataaaggt

SEQ ID NO: 184152 - DNA, 25 bp, Saccharomyces pastorianus
tctaatggtcgcctttttgcctttt

SEQ ID NO: 184153 - DNA, 25 bp, Saccharomyces pastorianus
gtgttagtcatctcgtttctttttc

SEQ ID NO: 184154 - DNA, 25 bp, Saccharomyces pastorianus
attattcttcactctgttttacatg

SEQ ID NO: 184155 - DNA, 25 bp, Saccharomyces pastorianus
tattcttcactctgttttacatgtt

SEQ ID NO: 184156 - DNA, 25 bp, Saccharomyces pastorianus
cgattattcttcactctgttttaca

SEQ ID NO: 184157 - DNA, 25 bp, Saccharomyces pastorianus
attcttcactctgttttacatgttt

SEQ ID NO: 184158 - DNA, 25 bp, Saccharomyces pastorianus
gattattcttcactctgttttacat

SEQ ID NO: 184159 - DNA, 25 bp, Saccharomyces pastorianus
ctctgttttacatgtttcattatcc

SEQ ID NO: 184160 - DNA, 25 bp, Saccharomyces pastorianus
tcttcactctgttttacatgtttca

SEQ ID NO: 184161 - DNA, 25 bp, Saccharomyces pastorianus
ttcactctgttttacatgtttcatt

SEQ ID NO: 184162 - DNA, 25 bp, Saccharomyces pastorianus
acgattattcttcactctgttttac

SEQ ID NO: 184163 - DNA, 25 bp, Saccharomyces pastorianus
ttcttcactctgttttacatgtttc

SEQ ID NO: 184164 - DNA, 25 bp, Saccharomyces pastorianus
ttattcttcactctgttttacatgt

SEQ ID NO: 184165 - DNA, 25 bp, Saccharomyces pastorianus
tgatggattattcaagtacactacc

SEQ ID NO: 184166 - DNA, 25 bp, Saccharomyces pastorianus
gttggatgatggattattcaagtac

SEQ ID NO: 184167 - DNA, 25 bp, Saccharomyces pastorianus
attcaagtacactaccaaggattgt

SEQ ID NO: 184168 - DNA, 25 bp, Saccharomyces pastorianus
ggattattcaagtacactaccaagg

SEQ ID NO: 184169 - DNA, 25 bp, Saccharomyces pastorianus
ttattcaagtacactaccaaggatt

SEQ ID NO: 184170 - DNA, 25 bp, Saccharomyces pastorianus
caagtacactaccaaggattgtatc

SEQ ID NO: 184171 - DNA, 25 bp, Saccharomyces pastorianus
ggatgatggattattcaagtacact

SEQ ID NO: 184172 - DNA, 25 bp, Saccharomyces pastorianus
gatggattattcaagtacactacca

SEQ ID NO: 184173 - DNA, 25 bp, Saccharomyces pastorianus
gattattcaagtacactaccaagga

SEQ ID NO: 184174 - DNA, 25 bp, Saccharomyces pastorianus
tattcaagtacactaccaaggattg

SEQ ID NO: 184175 - DNA, 25 bp, Saccharomyces pastorianus
tcaagtacactaccaaggattgtat

SEQ ID NO: 184176 - DNA, 25 bp, Saccharomyces pastorianus
tacgttactagtatattatcatata

SEQ ID NO: 184177 - DNA, 25 bp, Saccharomyces pastorianus
ttacgttactagtatattatcatat

SEQ ID NO: 184178 - DNA, 25 bp, Saccharomyces pastorianus
tagtatttacgttactagtatatta

SEQ ID NO: 184179 - DNA, 25 bp, Saccharomyces pastorianus
atttacgttactagtatattatcat

SEQ ID NO: 184180 - DNA, 25 bp, Saccharomyces pastorianus
cgttactagtatattatcatatacg

SEQ ID NO: 184181 - DNA, 25 bp, Saccharomyces pastorianus
tatttacgttactagtatattatca

SEQ ID NO: 184182 - DNA, 25 bp, Saccharomyces pastorianus
tttacgttactagtatattatcata

SEQ ID NO: 184183 - DNA, 25 bp, Saccharomyces pastorianus
acgttactagtatattatcatatac

SEQ ID NO: 184184 - DNA, 25 bp, Saccharomyces pastorianus
agtatttacgttactagtatattat

SEQ ID NO: 184185 - DNA, 25 bp, Saccharomyces pastorianus
ctatcatctactaactagtatttac

SEQ ID NO: 184186 - DNA, 25 bp, Saccharomyces pastorianus
gtatttacgttactagtatattatc

SEQ ID NO: 184187 - DNA, 25 bp, Saccharomyces pastorianus
aacaaccttgttccggaatcaatag

SEQ ID NO: 184188 - DNA, 25 bp, Saccharomyces pastorianus
gattttcttggttgcggtgatctaa

SEQ ID NO: 184189 - DNA, 25 bp, Saccharomyces pastorianus
aacagactttgtttgctggtccctt

SEQ ID NO: 184190 - DNA, 25 bp, Saccharomyces pastorianus
tgcagtagctttcccttggaacaaa

SEQ ID NO: 184191 - DNA, 25 bp, Saccharomyces pastorianus
gatccaaattatccggttgttcacg

SEQ ID NO: 184192 - DNA, 25 bp, Saccharomyces pastorianus
tgctggtcccttgtactataattat

SEQ ID NO: 184193 - DNA, 25 bp, Saccharomyces pastorianus
gaagccatggatctattaagcacta

SEQ ID NO: 184194 - DNA, 25 bp, Saccharomyces pastorianus
attgctggtcagagaacttttcctg

SEQ ID NO: 184195 - DNA, 25 bp, Saccharomyces pastorianus
ttgttcacgactacacgatgggcca

SEQ ID NO: 184196 - DNA, 25 bp, Saccharomyces pastorianus
ctagacaacaatccggtgcgactat

SEQ ID NO: 184197 - DNA, 25 bp, Saccharomyces pastorianus
taggaacttcgatcctgaagccatg

SEQ ID NO: 184198 - DNA, 25 bp, Saccharomyces pastorianus
atcttattcgttggcgtgggacaaa

SEQ ID NO: 184199 - DNA, 25 bp, Saccharomyces pastorianus
aaacctataccgatttgaggacatt

SEQ ID NO: 184200 - DNA, 25 bp, Saccharomyces pastorianus
gggattcctatcttattcgttggcg

SEQ ID NO: 184201 - DNA, 25 bp, Saccharomyces pastorianus
ctatcttattcgttggcgtgggaca

SEQ ID NO: 184202 - DNA, 25 bp, Saccharomyces pastorianus
ttcctatcttattcgttggcgtggg

SEQ ID NO: 184203 - DNA, 25 bp, Saccharomyces pastorianus
attcgttggcgtgggacaaacctat

SEQ ID NO: 184204 - DNA, 25 bp, Saccharomyces pastorianus
gggacaaacctataccgatttgagg

SEQ ID NO: 184205 - DNA, 25 bp, Saccharomyces pastorianus
gattcctatcttattcgttggcgtg

SEQ ID NO: 184206 - DNA, 25 bp, Saccharomyces pastorianus
gcgtgggacaaacctataccgattt

SEQ ID NO: 184207 - DNA, 25 bp, Saccharomyces pastorianus
ttattcgttggcgtgggacaaacct

SEQ ID NO: 184208 - DNA, 25 bp, Saccharomyces pastorianus
ataccgatttgaggacattaagcgt

SEQ ID NO: 184209 - DNA, 25 bp, Saccharomyces pastorianus
aaccaagacattttctaccaatgtt

SEQ ID NO: 184210 - DNA, 25 bp, Saccharomyces pastorianus
gtaaccaagacattttctaccaatg

SEQ ID NO: 184211 - DNA, 25 bp, Saccharomyces pastorianus
tggccattggtaaccaagacatttt

SEQ ID NO: 184212 - DNA, 25 bp, Saccharomyces pastorianus
tacgatgaacacattgggtctcaat

SEQ ID NO: 184213 - DNA, 25 bp, Saccharomyces pastorianus
aacttctacaatctgtacgatgaac

SEQ ID NO: 184214 - DNA, 25 bp, Saccharomyces pastorianus
tgtacgatgaacacattgggtctca

SEQ ID NO: 184215 - DNA, 25 bp, Saccharomyces pastorianus
cggtaacttctacaatctgtacgat

SEQ ID NO: 184216 - DNA, 25 bp, Saccharomyces pastorianus
tctacaatctgtacgatgaacacat

SEQ ID NO: 184217 - DNA, 25 bp, Saccharomyces pastorianus
cattggtaaccaagacattttctac

SEQ ID NO: 184218 - DNA, 25 bp, Saccharomyces pastorianus
gtaacttctacaatctgtacgatga

SEQ ID NO: 184219 - DNA, 25 bp, Saccharomyces pastorianus
atctgtacgatgaacacattgggtc

SEQ ID NO: 184220 - DNA, 25 bp, Saccharomyces pastorianus
gacagtttcccgtatcttatgtcat

SEQ ID NO: 184221 - DNA, 25 bp, Saccharomyces pastorianus
agtttcccgtatcttatgtcatcgt

SEQ ID NO: 184222 - DNA, 25 bp, Saccharomyces pastorianus
ttcgatgacagtttcccgtatctta

SEQ ID NO: 184223 - DNA, 25 bp, Saccharomyces pastorianus
tcgatgacagtttcccgtatcttat

SEQ ID NO: 184224 - DNA, 25 bp, Saccharomyces pastorianus
gtttcccgtatcttatgtcatcgtc

SEQ ID NO: 184225 - DNA, 25 bp, Saccharomyces pastorianus
cgatgacagtttcccgtatcttatg

SEQ ID NO: 184226 - DNA, 25 bp, Saccharomyces pastorianus
tgacagtttcccgtatcttatgtca

SEQ ID NO: 184227 - DNA, 25 bp, Saccharomyces pastorianus
gtatcttatgtcatcgtctaacacc

SEQ ID NO: 184228 - DNA, 25 bp, Saccharomyces pastorianus
acagtttcccgtatcttatgtcatc

SEQ ID NO: 184229 - DNA, 25 bp, Saccharomyces pastorianus
cagtttcccgtatcttatgtcatcg

SEQ ID NO: 184230 - DNA, 25 bp, Saccharomyces pastorianus
tttcccgtatcttatgtcatcgtct

SEQ ID NO: 184231 - DNA, 25 bp, Saccharomyces pastorianus
ggatgccttagaggattcggaagct

SEQ ID NO: 184232 - DNA, 25 bp, Saccharomyces pastorianus
ggattcggaagctgaagaagattca

SEQ ID NO: 184233 - DNA, 25 bp, Saccharomyces pastorianus
ggattcggaagctgaagcagattcg

SEQ ID NO: 184234 - DNA, 25 bp, Saccharomyces pastorianus
tcttggcagaagaggaagcggcagc

SEQ ID NO: 184235 - DNA, 25 bp, Saccharomyces pastorianus
agcagcagcggaggaggatgcctta

SEQ ID NO: 184236 - DNA, 25 bp, Saccharomyces pastorianus
ccttagaggattcggaagctgaaga

SEQ ID NO: 184237 - DNA, 25 bp, Saccharomyces pastorianus
cttggaagatgcagaagaggcagca

SEQ ID NO: 184238 - DNA, 25 bp, Saccharomyces pastorianus
gaagcggcagcagaggaagaggaag

SEQ ID NO: 184239 - DNA, 25 bp, Saccharomyces pastorianus
aagaggcagagctcttggcagaaga

SEQ ID NO: 184240 - DNA, 25 bp, Saccharomyces pastorianus
gaagatgccttggaagatgcagaag

SEQ ID NO: 184241 - DNA, 25 bp, Saccharomyces pastorianus
agcagaagaggcagagctcttggca

SEQ ID NO: 184242 - DNA, 25 bp, Saccharomyces pastorianus
agacgaatcggttctcgactctgtc

SEQ ID NO: 184243 - DNA, 25 bp, Saccharomyces pastorianus
tacctagaggcgctgttgcagaatt

SEQ ID NO: 184244 - DNA, 25 bp, Saccharomyces pastorianus
gatgatgtttcaaccgtattccaga

SEQ ID NO: 184245 - DNA, 25 bp, Saccharomyces pastorianus
actacagttagtgcgtttggatata

SEQ ID NO: 184246 - DNA, 25 bp, Saccharomyces pastorianus
gactctgtcatcaaaacatgggcgt

SEQ ID NO: 184247 - DNA, 25 bp, Saccharomyces pastorianus
gatttctgaattacctagaggcgct

SEQ ID NO: 184248 - DNA, 25 bp, Saccharomyces pastorianus
cagcccagattaccctctattataa

SEQ ID NO: 184249 - DNA, 25 bp, Saccharomyces pastorianus
aagaaatcatcactttccaccatca

SEQ ID NO: 184250 - DNA, 25 bp, Saccharomyces pastorianus
gtggagaaactttttgattaccgtg

SEQ ID NO: 184251 - DNA, 25 bp, Saccharomyces pastorianus
aacacctctcactgaccaaatagtt

SEQ ID NO: 184252 - DNA, 25 bp, Saccharomyces pastorianus
acatgggcgttttattgttcaaata

SEQ ID NO: 184253 - DNA, 25 bp, Saccharomyces pastorianus
tattgttttatggcactcatgtgta

SEQ ID NO: 184254 - DNA, 25 bp, Saccharomyces pastorianus
ttgttttatggcactcatgtgtatt

SEQ ID NO: 184255 - DNA, 25 bp, Saccharomyces pastorianus
gtattgttttatggcactcatgtgt

SEQ ID NO: 184256 - DNA, 25 bp, Saccharomyces pastorianus
tggagtattgttttatggcactcat

SEQ ID NO: 184257 - DNA, 25 bp, Saccharomyces pastorianus
attgttttatggcactcatgtgtat

SEQ ID NO: 184258 - DNA, 25 bp, Saccharomyces pastorianus
ggagtattgttttatggcactcatg

SEQ ID NO: 184259 - DNA, 25 bp, Saccharomyces pastorianus
agtattgttttatggcactcatgtg

SEQ ID NO: 184260 - DNA, 25 bp, Saccharomyces pastorianus
tgtggagtattgttttatggcactc

SEQ ID NO: 184261 - DNA, 25 bp, Saccharomyces pastorianus
atggagatgctcttgtttctgaacg

SEQ ID NO: 184262 - DNA, 25 bp, Saccharomyces pastorianus
gtggagtattgttttatggcactca

SEQ ID NO: 184263 - DNA, 25 bp, Saccharomyces pastorianus
gagtattgttttatggcactcatgt

SEQ ID NO: 184264 - DNA, 25 bp, Saccharomyces pastorianus
aagcctcttcatctttaagagcgaa

SEQ ID NO: 184265 - DNA, 25 bp, Saccharomyces pastorianus
aactttcgacgggtgcaccaaatga

SEQ ID NO: 184266 - DNA, 25 bp, Saccharomyces pastorianus
ggattgaaagcctcttcatctttaa

SEQ ID NO: 184267 - DNA, 25 bp, Saccharomyces pastorianus
gacgggtgcaccaaatgatcaaaac

SEQ ID NO: 184268 - DNA, 25 bp, Saccharomyces pastorianus
gtactaacttcgctttgtgttgcaa

SEQ ID NO: 184269 - DNA, 25 bp, Saccharomyces pastorianus
tttgtgttgcaatccctaccacgct

SEQ ID NO: 184270 - DNA, 25 bp, Saccharomyces pastorianus
tacattgcctattttttattccaca

SEQ ID NO: 184271 - DNA, 25 bp, Saccharomyces pastorianus
accacgctcgatctggtagagacaa

SEQ ID NO: 184272 - DNA, 25 bp, Saccharomyces pastorianus
gatatatactataccacttacattg

SEQ ID NO: 184273 - DNA, 25 bp, Saccharomyces pastorianus
tggaagactaactaaactttcgacg

SEQ ID NO: 184274 - DNA, 25 bp, Saccharomyces pastorianus
gatttgataactcatacattgccta

SEQ ID NO: 184275 - DNA, 25 bp, Saccharomyces pastorianus
tcaggtggcatcgatttggcctttc

SEQ ID NO: 184276 - DNA, 25 bp, Saccharomyces pastorianus
tgggctctaccattagcaatccaga

SEQ ID NO: 184277 - DNA, 25 bp, Saccharomyces pastorianus
gacgttacggttcctctattggata

SEQ ID NO: 184278 - DNA, 25 bp, Saccharomyces pastorianus
atttggcctttcctcaccatgataa

SEQ ID NO: 184279 - DNA, 25 bp, Saccharomyces pastorianus
caccgttacaactcgtgtttctgag

SEQ ID NO: 184280 - DNA, 25 bp, Saccharomyces pastorianus
atggccagtgatatcctaggctcta

SEQ ID NO: 184281 - DNA, 25 bp, Saccharomyces pastorianus
gactatgctaaatgccagccatgga

SEQ ID NO: 184282 - DNA, 25 bp, Saccharomyces pastorianus
taggctctaacatcgatattcattc

SEQ ID NO: 184283 - DNA, 25 bp, Saccharomyces pastorianus
tgaagggtccttaagcaactttgct

SEQ ID NO: 184284 - DNA, 25 bp, Saccharomyces pastorianus
ttccatggacgcagaagttgccttt

SEQ ID NO: 184285 - DNA, 25 bp, Saccharomyces pastorianus
aagcttccaaggcaggtgaacctga

SEQ ID NO: 184286 - DNA, 25 bp, Saccharomyces pastorianus
gagtcttcctagcattcatacacaa

SEQ ID NO: 184287 - DNA, 25 bp, Saccharomyces pastorianus
caagaaattcgcagacggtgttaat

SEQ ID NO: 184288 - DNA, 25 bp, Saccharomyces pastorianus
aagatgctgagaatgggccttcaag

SEQ ID NO: 184289 - DNA, 25 bp, Saccharomyces pastorianus
gaatttttgcactgaactcccatat

SEQ ID NO: 184290 - DNA, 25 bp, Saccharomyces pastorianus
gagacatttcgttagaatctatcca

SEQ ID NO: 184291 - DNA, 25 bp, Saccharomyces pastorianus
accccgcatctacgatttggagttt

SEQ ID NO: 184292 - DNA, 25 bp, Saccharomyces pastorianus
tagaggctcccgtagggtttgatgt

SEQ ID NO: 184293 - DNA, 25 bp, Saccharomyces pastorianus
ggatttctactgagtcttcctagca

SEQ ID NO: 184294 - DNA, 25 bp, Saccharomyces pastorianus
aatgatctggtaagtgtcccggatc

SEQ ID NO: 184295 - DNA, 25 bp, Saccharomyces pastorianus
agtgtcccggatcaatacggttgga

SEQ ID NO: 184296 - DNA, 25 bp, Saccharomyces pastorianus
actgcaagaagcgatgtgtgtatta

SEQ ID NO: 184297 - DNA, 25 bp, Saccharomyces pastorianus
aacgatgaacgtgaggagctgttta

SEQ ID NO: 184298 - DNA, 25 bp, Saccharomyces pastorianus
gaacgtcagaattttatagcggaaa

SEQ ID NO: 184299 - DNA, 25 bp, Saccharomyces pastorianus
taaaattgacgatttttcttccctg

SEQ ID NO: 184300 - DNA, 25 bp, Saccharomyces pastorianus
aacttgggtcaatttttgcaggcaa

SEQ ID NO: 184301 - DNA, 25 bp, Saccharomyces pastorianus
ttatcttcctgagacaatctggccc

SEQ ID NO: 184302 - DNA, 25 bp, Saccharomyces pastorianus
gaactacacagcgaagtttctgaaa

SEQ ID NO: 184303 - DNA, 25 bp, Saccharomyces pastorianus
aattcattgacacagcactttgata

SEQ ID NO: 184304 - DNA, 25 bp, Saccharomyces pastorianus
tttaaggtggtacaaggcgacgaca

SEQ ID NO: 184305 - DNA, 25 bp, Saccharomyces pastorianus
aacattttcaaaactctgcatgagg

SEQ ID NO: 184306 - DNA, 25 bp, Saccharomyces pastorianus
gaaagctacggtaacttagttctag

SEQ ID NO: 184307 - DNA, 25 bp, Saccharomyces pastorianus
gaatttagatgctcaggaccaggaa

SEQ ID NO: 184308 - DNA, 25 bp, Saccharomyces pastorianus
agcattccttttatctactttcggc

SEQ ID NO: 184309 - DNA, 25 bp, Saccharomyces pastorianus
gcttttcacttccaattcatttact

SEQ ID NO: 184310 - DNA, 25 bp, Saccharomyces pastorianus
gagactgggtgaaacattagctgat

SEQ ID NO: 184311 - DNA, 25 bp, Saccharomyces pastorianus
tctactttcggcatgttgacgttgt

SEQ ID NO: 184312 - DNA, 25 bp, Saccharomyces pastorianus
tagcgactgcaattggtatcattat

SEQ ID NO: 184313 - DNA, 25 bp, Saccharomyces pastorianus
attcatgctttgcttttcacttcca

SEQ ID NO: 184314 - DNA, 25 bp, Saccharomyces pastorianus
gggtaccctgttagcgactgcaatt

SEQ ID NO: 184315 - DNA, 25 bp, Saccharomyces pastorianus
aaaaggcaatccaccactgcattat

SEQ ID NO: 184316 - DNA, 25 bp, Saccharomyces pastorianus
taacccggttagcttctatgattac

SEQ ID NO: 184317 - DNA, 25 bp, Saccharomyces pastorianus
gggtcaatccttcgacagcaaattc

SEQ ID NO: 184318 - DNA, 25 bp, Saccharomyces pastorianus
gttacaaacctatgtttccatggaa

SEQ ID NO: 184319 - DNA, 25 bp, Saccharomyces pastorianus
ttcttttcaactgcgcaccatttaa

SEQ ID NO: 184320 - DNA, 25 bp, Saccharomyces pastorianus
ttactacgtcaacaatcaccgaaat

SEQ ID NO: 184321 - DNA, 25 bp, Saccharomyces pastorianus
aacaactgtatttactacgtcaaca

SEQ ID NO: 184322 - DNA, 25 bp, Saccharomyces pastorianus
caaaccatgcagtttcttttcaact

SEQ ID NO: 184323 - DNA, 25 bp, Saccharomyces pastorianus
cgcaccatttaagtggaagggtcct

SEQ ID NO: 184324 - DNA, 25 bp, Saccharomyces pastorianus
agcggaaaccgctttgaatactgct

SEQ ID NO: 184325 - DNA, 25 bp, Saccharomyces pastorianus
cactcggtcgatgtaacaactgtat

SEQ ID NO: 184326 - DNA, 25 bp, Saccharomyces pastorianus
taaccgtactttgtcactcggtcga

SEQ ID NO: 184327 - DNA, 25 bp, Saccharomyces pastorianus
ataacttcttgtgcgctgaacttta

SEQ ID NO: 184328 - DNA, 25 bp, Saccharomyces pastorianus
tactgctactaacataattcaaacc

SEQ ID NO: 184329 - DNA, 25 bp, Saccharomyces pastorianus
gtactttgtcactcggtcgatgtaa

SEQ ID NO: 184330 - DNA, 25 bp, Saccharomyces pastorianus
gatggtactactattgaagcgcaaa

SEQ ID NO: 184331 - DNA, 25 bp, Saccharomyces pastorianus
ttgcgcatttagaagaagaactcac

SEQ ID NO: 184332 - DNA, 25 bp, Saccharomyces pastorianus
gatgagacaggagcttgaacagtta

SEQ ID NO: 184333 - DNA, 25 bp, Saccharomyces pastorianus
gcaaccaagcagaagcacaaagcaa

SEQ ID NO: 184334 - DNA, 25 bp, Saccharomyces pastorianus
gcatcaaaatgcaagggaactgtta

SEQ ID NO: 184335 - DNA, 25 bp, Saccharomyces pastorianus
agaactcacgaaggaaatgggcggt

SEQ ID NO: 184336 - DNA, 25 bp, Saccharomyces pastorianus
aattgaggacaatttcacgcagcat

SEQ ID NO: 184337 - DNA, 25 bp, Saccharomyces pastorianus
acatccaacatgaacgtgagtctga

SEQ ID NO: 184338 - DNA, 25 bp, Saccharomyces pastorianus
tgttgcccataatacagatgcttgt

SEQ ID NO: 184339 - DNA, 25 bp, Saccharomyces pastorianus
gcgcaaattgatgcaaaggtcattt

SEQ ID NO: 184340 - DNA, 25 bp, Saccharomyces pastorianus
tggatcgatgttgcccataatacag

SEQ ID NO: 184341 - DNA, 25 bp, Saccharomyces pastorianus
tacgtttctagtgatctcttattga

SEQ ID NO: 184342 - DNA, 25 bp, Saccharomyces pastorianus
gaatccttcaacagcgatctttatt

SEQ ID NO: 184343 - DNA, 25 bp, Saccharomyces pastorianus
gctcacctcgtcacataataacagt

SEQ ID NO: 184344 - DNA, 25 bp, Saccharomyces pastorianus
aagaacaaatctgcttgcccaagtt

SEQ ID NO: 184345 - DNA, 25 bp, Saccharomyces pastorianus
agtagcactaacatgaatccttcaa

SEQ ID NO: 184346 - DNA, 25 bp, Saccharomyces pastorianus
tgcccaagttcttttgatgccaatg

SEQ ID NO: 184347 - DNA, 25 bp, Saccharomyces pastorianus
tggacctttggaaccatccgaaaat

SEQ ID NO: 184348 - DNA, 25 bp, Saccharomyces pastorianus
tgggcacatccacttctggcaagaa

SEQ ID NO: 184349 - DNA, 25 bp, Saccharomyces pastorianus
gatgacactaatttatcacgccgaa

SEQ ID NO: 184350 - DNA, 25 bp, Saccharomyces pastorianus
actaattctacctcaagttccaatg

SEQ ID NO: 184351 - DNA, 25 bp, Saccharomyces pastorianus
tgcaagtccgaataccactactatg

SEQ ID NO: 184352 - DNA, 25 bp, Saccharomyces pastorianus
gtatattaaggcctctgtatcccag

SEQ ID NO: 184353 - DNA, 25 bp, Saccharomyces pastorianus
gacccataggccttgtggattttaa

SEQ ID NO: 184354 - DNA, 25 bp, Saccharomyces pastorianus
atctgggtgataagttattagaaac

SEQ ID NO: 184355 - DNA, 25 bp, Saccharomyces pastorianus
cataggccttgtggattttaagaac

SEQ ID NO: 184356 - DNA, 25 bp, Saccharomyces pastorianus
attaaggcctctgtatcccagggag

SEQ ID NO: 184357 - DNA, 25 bp, Saccharomyces pastorianus
ggagatgataagacccataggcctt

SEQ ID NO: 184358 - DNA, 25 bp, Saccharomyces pastorianus
ataagacccataggccttgtggatt

SEQ ID NO: 184359 - DNA, 25 bp, Saccharomyces pastorianus
gaacagttcagagtatattaaggcc

SEQ ID NO: 184360 - DNA, 25 bp, Saccharomyces pastorianus
gcctctgtatcccagggagggttaa

SEQ ID NO: 184361 - DNA, 25 bp, Saccharomyces pastorianus
gatgataagacccataggccttgtg

SEQ ID NO: 184362 - DNA, 25 bp, Saccharomyces pastorianus
gccttgtggattttaagaacagttc

SEQ ID NO: 184363 - DNA, 25 bp, Saccharomyces pastorianus
ggagaactgtaccaactttcctatc

SEQ ID NO: 184364 - DNA, 25 bp, Saccharomyces pastorianus
cgagggatcattatcgtttttgaat

SEQ ID NO: 184365 - DNA, 25 bp, Saccharomyces pastorianus
aagagtctgtttccctttcttggag

SEQ ID NO: 184366 - DNA, 25 bp, Saccharomyces pastorianus
gaggctttgggcgatggctttaata

SEQ ID NO: 184367 - DNA, 25 bp, Saccharomyces pastorianus
gaatctacgatactgcgcaatattt

SEQ ID NO: 184368 - DNA, 25 bp, Saccharomyces pastorianus
gcggatattgaactaattggctctc

SEQ ID NO: 184369 - DNA, 25 bp, Saccharomyces pastorianus
tttattcccgatgaaagtcttctag

SEQ ID NO: 184370 - DNA, 25 bp, Saccharomyces pastorianus
tttcctatcttcaccacaaattcga

SEQ ID NO: 184371 - DNA, 25 bp, Saccharomyces pastorianus
tcttggagggtctgcgccatatttc

SEQ ID NO: 184372 - DNA, 25 bp, Saccharomyces pastorianus
attggctctcagaagagtctgtttc

SEQ ID NO: 184373 - DNA, 25 bp, Saccharomyces pastorianus
tctcctttcccgctaactacggtat

SEQ ID NO: 184374 - DNA, 25 bp, Saccharomyces pastorianus
gcttatgccaagttacttgaagaaa

SEQ ID NO: 184375 - DNA, 25 bp, Saccharomyces pastorianus
tacttgaagaaagaaagcggaggga

SEQ ID NO: 184376 - DNA, 25 bp, Saccharomyces pastorianus
agttacttgaagaaagaaagcggag

SEQ ID NO: 184377 - DNA, 25 bp, Saccharomyces pastorianus
ttatgccaagttacttgaagaaaga

SEQ ID NO: 184378 - DNA, 25 bp, Saccharomyces pastorianus
tgcttatgccaagttacttgaagaa

SEQ ID NO: 184379 - DNA, 25 bp, Saccharomyces pastorianus
atgcttatgccaagttacttgaaga

SEQ ID NO: 184380 - DNA, 25 bp, Saccharomyces pastorianus
cttatgccaagttacttgaagaaag

SEQ ID NO: 184381 - DNA, 25 bp, Saccharomyces pastorianus
ccaagttacttgaagaaagaaagcg

SEQ ID NO: 184382 - DNA, 25 bp, Saccharomyces pastorianus
gccaagttacttgaagaaagaaagc

SEQ ID NO: 184383 - DNA, 25 bp, Saccharomyces pastorianus
tatgccaagttacttgaagaaagaa

SEQ ID NO: 184384 - DNA, 25 bp, Saccharomyces pastorianus
atgccaagttacttgaagaaagaaa

SEQ ID NO: 184385 - DNA, 25 bp, Saccharomyces pastorianus
aaaatggaatcccaacaattacatc

SEQ ID NO: 184386 - DNA, 25 bp, Saccharomyces pastorianus
aaatggaatcccaacaattacatca

SEQ ID NO: 184387 - DNA, 25 bp, Saccharomyces pastorianus
tcgccttataaaaaatggaatccca

SEQ ID NO: 184388 - DNA, 25 bp, Saccharomyces pastorianus
acattctcttcaaatggaatcccaa

SEQ ID NO: 184389 - DNA, 25 bp, Saccharomyces pastorianus
aaaaatggaatcccaacaattacat

SEQ ID NO: 184390 - DNA, 25 bp, Saccharomyces pastorianus
cacattctcttcaaatggaatccca

SEQ ID NO: 184391 - DNA, 25 bp, Saccharomyces pastorianus
ttataaaaaatggaatcccaacaat

SEQ ID NO: 184392 - DNA, 25 bp, Saccharomyces pastorianus
tataaaaaatggaatcccaacaatt

SEQ ID NO: 184393 - DNA, 25 bp, Saccharomyces pastorianus
gaatcccaacaattacatcaaaatc

SEQ ID NO: 184394 - DNA, 25 bp, Saccharomyces pastorianus
tatcgccttataaaaaatggaatcc

SEQ ID NO: 184395 - DNA, 25 bp, Saccharomyces pastorianus
cattctcttcaaatggaatcccaac

SEQ ID NO: 184396 - DNA, 25 bp, Saccharomyces pastorianus
tatacacttatttcaatattataga

SEQ ID NO: 184397 - DNA, 25 bp, Saccharomyces pastorianus
atacattacaccacttttacaccat

SEQ ID NO: 184398 - DNA, 25 bp, Saccharomyces pastorianus
cattacaccacttttacaccatata

SEQ ID NO: 184399 - DNA, 25 bp, Saccharomyces pastorianus
tacaccacttttacaccatatacta

SEQ ID NO: 184400 - DNA, 25 bp, Saccharomyces pastorianus
tacattacaccacttttacaccata

SEQ ID NO: 184401 - DNA, 25 bp, Saccharomyces pastorianus
taactgctcttaatacatacattac

SEQ ID NO: 184402 - DNA, 25 bp, Saccharomyces pastorianus
catacattacaccacttttacacca

SEQ ID NO: 184403 - DNA, 25 bp, Saccharomyces pastorianus
acattacaccacttttacaccatat

SEQ ID NO: 184404 - DNA, 25 bp, Saccharomyces pastorianus
attacaccacttttacaccatatac

SEQ ID NO: 184405 - DNA, 25 bp, Saccharomyces pastorianus
atacacttatttcaatattatagaa

SEQ ID NO: 184406 - DNA, 25 bp, Saccharomyces pastorianus
caccacttttacaccatatactaac

SEQ ID NO: 184407 - DNA, 25 bp, Saccharomyces pastorianus
tctagcgggatcgaaccgctgatcc

SEQ ID NO: 184408 - DNA, 25 bp, Saccharomyces pastorianus
cgaaccgctgatccccgcgttatta

SEQ ID NO: 184409 - DNA, 25 bp, Saccharomyces pastorianus
gtctctagcgggatcgaaccgctga

SEQ ID NO: 184410 - DNA, 25 bp, Saccharomyces pastorianus
atggtctctagcgggatcgaaccgc

SEQ ID NO: 184411 - DNA, 25 bp, Saccharomyces pastorianus
ctagcgggatcgaaccgctgatccc

SEQ ID NO: 184412 - DNA, 25 bp, Saccharomyces pastorianus
tctctagcgggatcgaaccgctgat

SEQ ID NO: 184413 - DNA, 25 bp, Saccharomyces pastorianus
ctctagcgggatcgaaccgctgatc

SEQ ID NO: 184414 - DNA, 25 bp, Saccharomyces pastorianus
ggtctctagcgggatcgaaccgctg

SEQ ID NO: 184415 - DNA, 25 bp, Saccharomyces pastorianus
ggatcgaaccgctgatccccgcgtt

SEQ ID NO: 184416 - DNA, 25 bp, Saccharomyces pastorianus
tagcgggatcgaaccgctgatcccc

SEQ ID NO: 184417 - DNA, 25 bp, Saccharomyces pastorianus
gctgatccccgcgttattagcacgg

SEQ ID NO: 184418 - DNA, 25 bp, Saccharomyces pastorianus
tattatactagagattctcctcatg

SEQ ID NO: 184419 - DNA, 25 bp, Saccharomyces pastorianus
atatattatactagagattctcctc

SEQ ID NO: 184420 - DNA, 25 bp, Saccharomyces pastorianus
atatatattatactagagattctcc

SEQ ID NO: 184421 - DNA, 25 bp, Saccharomyces pastorianus
atattatactagagattctcctcat

SEQ ID NO: 184422 - DNA, 25 bp, Saccharomyces pastorianus
gatctttgggattccattatttctt

SEQ ID NO: 184423 - DNA, 25 bp, Saccharomyces pastorianus
tatattatactagagattctcctca

SEQ ID NO: 184424 - DNA, 25 bp, Saccharomyces pastorianus
tgggattccattatttcttaatgtt

SEQ ID NO: 184425 - DNA, 25 bp, Saccharomyces pastorianus
ctttgggattccattatttcttaat

SEQ ID NO: 184426 - DNA, 25 bp, Saccharomyces pastorianus
atctttgggattccattatttctta

SEQ ID NO: 184427 - DNA, 25 bp, Saccharomyces pastorianus
tctttgggattccattatttcttaa

SEQ ID NO: 184428 - DNA, 25 bp, Saccharomyces pastorianus
tatatattatactagagattctcct

SEQ ID NO: 184429 - DNA, 25 bp, Saccharomyces pastorianus
ccttggcaagaggtgagaggcctat

SEQ ID NO: 184430 - DNA, 25 bp, Saccharomyces pastorianus
gttccctccgccttggcaagaggtg

SEQ ID NO: 184431 - DNA, 25 bp, Saccharomyces pastorianus
tccctccgccttggcaagaggtgag

SEQ ID NO: 184432 - DNA, 25 bp, Saccharomyces pastorianus
ggcaagaggtgagaggcctatcccc

SEQ ID NO: 184433 - DNA, 25 bp, Saccharomyces pastorianus
ttggcaagaggtgagaggcctatcc

SEQ ID NO: 184434 - DNA, 25 bp, Saccharomyces pastorianus
aagaggtgagaggcctatccccaaa

SEQ ID NO: 184435 - DNA, 25 bp, Saccharomyces pastorianus
ttccctccgccttggcaagaggtga

SEQ ID NO: 184436 - DNA, 25 bp, Saccharomyces pastorianus
gcaagaggtgagaggcctatcccca

SEQ ID NO: 184437 - DNA, 25 bp, Saccharomyces pastorianus
cttggcaagaggtgagaggcctatc

SEQ ID NO: 184438 - DNA, 25 bp, Saccharomyces pastorianus
caagaggtgagaggcctatccccaa

SEQ ID NO: 184439 - DNA, 25 bp, Saccharomyces pastorianus
tggcaagaggtgagaggcctatccc

SEQ ID NO: 184440 - DNA, 25 bp, Saccharomyces pastorianus
aatacggatccatgacgcgcgctgc

SEQ ID NO: 184441 - DNA, 25 bp, Saccharomyces pastorianus
acaggagttacgaatgctggccact

SEQ ID NO: 184442 - DNA, 25 bp, Saccharomyces pastorianus
ataggtttcaggcattgtcttccca

SEQ ID NO: 184443 - DNA, 25 bp, Saccharomyces pastorianus
atctggcacttctgcagctgcagta

SEQ ID NO: 184444 - DNA, 25 bp, Saccharomyces pastorianus
ggagattctgcagcctttattcagc

SEQ ID NO: 184445 - DNA, 25 bp, Saccharomyces pastorianus
agcaccgtcccagaatacttgaaaa

SEQ ID NO: 184446 - DNA, 25 bp, Saccharomyces pastorianus
aagacagaagcttccagctcttgga

SEQ ID NO: 184447 - DNA, 25 bp, Saccharomyces pastorianus
gcacggccaagtacctacatgttag

SEQ ID NO: 184448 - DNA, 25 bp, Saccharomyces pastorianus
agtgcaacaaaaccccatggccagt

SEQ ID NO: 184449 - DNA, 25 bp, Saccharomyces pastorianus
gggtgccactactacagtgcaacaa

SEQ ID NO: 184450 - DNA, 25 bp, Saccharomyces pastorianus
aagcacaagtgtacgcgcagcaatc

SEQ ID NO: 184451 - DNA, 25 bp, Saccharomyces pastorianus
gcacttgtacaaaagcctcgtcttc

SEQ ID NO: 184452 - DNA, 25 bp, Saccharomyces pastorianus
attattggtgtcaacggtccctcaa

SEQ ID NO: 184453 - DNA, 25 bp, Saccharomyces pastorianus
tatgcttacccttcttctgacggtt

SEQ ID NO: 184454 - DNA, 25 bp, Saccharomyces pastorianus
gaaaacttccactactacgtcatct

SEQ ID NO: 184455 - DNA, 25 bp, Saccharomyces pastorianus
gaagacatacctaatcagtgatcca

SEQ ID NO: 184456 - DNA, 25 bp, Saccharomyces pastorianus
tcgtcttcatccattactacttcat

SEQ ID NO: 184457 - DNA, 25 bp, Saccharomyces pastorianus
gacggttgcacagtttggatgccaa

SEQ ID NO: 184458 - DNA, 25 bp, Saccharomyces pastorianus
gggacaaccaccttcgatttatcga

SEQ ID NO: 184459 - DNA, 25 bp, Saccharomyces pastorianus
aggtgatgctgctcagtactggcaa

SEQ ID NO: 184460 - DNA, 25 bp, Saccharomyces pastorianus
actacttcatccattactacttcat

SEQ ID NO: 184461 - DNA, 25 bp, Saccharomyces pastorianus
gattttacatccacttttcaggttt

SEQ ID NO: 184462 - DNA, 25 bp, Saccharomyces pastorianus
tctaaaaatataccatctctctccc

SEQ ID NO: 184463 - DNA, 25 bp, Saccharomyces pastorianus
acagatctgatgactcccactgaaa

SEQ ID NO: 184464 - DNA, 25 bp, Saccharomyces pastorianus
gcaagattacagtcagttgtcccta

SEQ ID NO: 184465 - DNA, 25 bp, Saccharomyces pastorianus
ccctcatgccatcaaaagacgtcat

SEQ ID NO: 184466 - DNA, 25 bp, Saccharomyces pastorianus
aatgtacaagatttcagccctaagc

SEQ ID NO: 184467 - DNA, 25 bp, Saccharomyces pastorianus
ttccgactctatttcccaatcttta

SEQ ID NO: 184468 - DNA, 25 bp, Saccharomyces pastorianus
aatacctcccggacttgcaaatgta

SEQ ID NO: 184469 - DNA, 25 bp, Saccharomyces pastorianus
aataacgctaggtcactccttacag

SEQ ID NO: 184470 - DNA, 25 bp, Saccharomyces pastorianus
agacgtcatcaaccttattcagaag

SEQ ID NO: 184471 - DNA, 25 bp, Saccharomyces pastorianus
tattaaatgccgtcgcttctaatcc

SEQ ID NO: 184472 - DNA, 25 bp, Saccharomyces pastorianus
agccaattcgaatcttccttgtcta

SEQ ID NO: 184473 - DNA, 25 bp, Saccharomyces pastorianus
taccggaccgcaatcttcgtaggat

SEQ ID NO: 184474 - DNA, 25 bp, Saccharomyces pastorianus
tcatggctattctttgttgggctat

SEQ ID NO: 184475 - DNA, 25 bp, Saccharomyces pastorianus
gagaccaatcgcaggctatatcgct

SEQ ID NO: 184476 - DNA, 25 bp, Saccharomyces pastorianus
aaatctggccactgcgatagtcttt

SEQ ID NO: 184477 - DNA, 25 bp, Saccharomyces pastorianus
ttgccttagtcgctccaataattgg

SEQ ID NO: 184478 - DNA, 25 bp, Saccharomyces pastorianus
ataattggtctggagcttcgcacga

SEQ ID NO: 184479 - DNA, 25 bp, Saccharomyces pastorianus
gatttttattgccacctttgcctta

SEQ ID NO: 184480 - DNA, 25 bp, Saccharomyces pastorianus
tgcacgcatcgttggtctccaaaaa

SEQ ID NO: 184481 - DNA, 25 bp, Saccharomyces pastorianus
aattgcttccattgttgcacgcatc

SEQ ID NO: 184482 - DNA, 25 bp, Saccharomyces pastorianus
aactagctgttacttttggcgtcac

SEQ ID NO: 184483 - DNA, 25 bp, Saccharomyces pastorianus
gtctttggattgttagccggttcta

SEQ ID NO: 184484 - DNA, 25 bp, Saccharomyces pastorianus
tacactaccggccacgagtacagac

SEQ ID NO: 184485 - DNA, 25 bp, Saccharomyces pastorianus
ctgagttggtcaaaactagctctga

SEQ ID NO: 184486 - DNA, 25 bp, Saccharomyces pastorianus
acgagtacagacctgaaggctccga

SEQ ID NO: 184487 - DNA, 25 bp, Saccharomyces pastorianus
cagacctgaaggctccgacgatgaa

SEQ ID NO: 184488 - DNA, 25 bp, Saccharomyces pastorianus
taccggccacgagtacagacctgaa

SEQ ID NO: 184489 - DNA, 25 bp, Saccharomyces pastorianus
tacacattaggcgaaggttacacta

SEQ ID NO: 184490 - DNA, 25 bp, Saccharomyces pastorianus
taggcgaaggttacactaccggcca

SEQ ID NO: 184491 - DNA, 25 bp, Saccharomyces pastorianus
ccggccacgagtacagacctgaagg

SEQ ID NO: 184492 - DNA, 25 bp, Saccharomyces pastorianus
gaaggttacactaccggccacgagt

SEQ ID NO: 184493 - DNA, 25 bp, Saccharomyces pastorianus
gtacagacctgaaggctccgacgat

SEQ ID NO: 184494 - DNA, 25 bp, Saccharomyces pastorianus
gacctgaaggctccgacgatgaaat

SEQ ID NO: 184495 - DNA, 25 bp, Saccharomyces pastorianus
atggtgatcatgcttgataatagac

SEQ ID NO: 184496 - DNA, 25 bp, Saccharomyces pastorianus
ttattgagctcattcaaggcgtagg

SEQ ID NO: 184497 - DNA, 25 bp, Saccharomyces pastorianus
gtgatcatgcttgataatagactta

SEQ ID NO: 184498 - DNA, 25 bp, Saccharomyces pastorianus
gatcatgcttgataatagacttaat

SEQ ID NO: 184499 - DNA, 25 bp, Saccharomyces pastorianus
atcatgcttgataatagacttaata

SEQ ID NO: 184500 - DNA, 25 bp, Saccharomyces pastorianus
gatggtgatcatgcttgataataga

SEQ ID NO: 184501 - DNA, 25 bp, Saccharomyces pastorianus
ggtgatcatgcttgataatagactt

SEQ ID NO: 184502 - DNA, 25 bp, Saccharomyces pastorianus
atgatggtgatcatgcttgataata

SEQ ID NO: 184503 - DNA, 25 bp, Saccharomyces pastorianus
catgcttgataatagacttaatatt

SEQ ID NO: 184504 - DNA, 25 bp, Saccharomyces pastorianus
tattgagctcattcaaggcgtaggg

SEQ ID NO: 184505 - DNA, 25 bp, Saccharomyces pastorianus
tgatcatgcttgataatagacttaa

SEQ ID NO: 184506 - DNA, 25 bp, Saccharomyces pastorianus
catatggtggtaacattgggttcga

SEQ ID NO: 184507 - DNA, 25 bp, Saccharomyces pastorianus
caagttgggccttcatcatctacaa

SEQ ID NO: 184508 - DNA, 25 bp, Saccharomyces pastorianus
ggccgcttaattggtacatatggtg

SEQ ID NO: 184509 - DNA, 25 bp, Saccharomyces pastorianus
ccgcttaattggtacatatggtggt

SEQ ID NO: 184510 - DNA, 25 bp, Saccharomyces pastorianus
tcatctacaacatcttaagaccctt

SEQ ID NO: 184511 - DNA, 25 bp, Saccharomyces pastorianus
cattgggttcgagttgggtgcaagt

SEQ ID NO: 184512 - DNA, 25 bp, Saccharomyces pastorianus
tctacaacatcttaagaccctttag

SEQ ID NO: 184513 - DNA, 25 bp, Saccharomyces pastorianus
tgggtgcaagttgggccttcatcat

SEQ ID NO: 184514 - DNA, 25 bp, Saccharomyces pastorianus
caacatcttaagaccctttagaatt

SEQ ID NO: 184515 - DNA, 25 bp, Saccharomyces pastorianus
tgcaagttgggccttcatcatctac

SEQ ID NO: 184516 - DNA, 25 bp, Saccharomyces pastorianus
agttgggtgcaagttgggccttcat

SEQ ID NO: 184517 - DNA, 25 bp, Saccharomyces pastorianus
gaagcacccacaaatgtatcaagag

SEQ ID NO: 184518 - DNA, 25 bp, Saccharomyces pastorianus
tataattccaactgagcccctccat

SEQ ID NO: 184519 - DNA, 25 bp, Saccharomyces pastorianus
gatcgcctctgaagttcacgaaggt

SEQ ID NO: 184520 - DNA, 25 bp, Saccharomyces pastorianus
agatacgatcgcctctgaagttcac

SEQ ID NO: 184521 - DNA, 25 bp, Saccharomyces pastorianus
ggatctctggtgatgaagacaccca

SEQ ID NO: 184522 - DNA, 25 bp, Saccharomyces pastorianus
agagatagctataattccaactgag

SEQ ID NO: 184523 - DNA, 25 bp, Saccharomyces pastorianus
agaacctattgggatctctggtgat

SEQ ID NO: 184524 - DNA, 25 bp, Saccharomyces pastorianus
aaatcaacgccatcagaccaatatg

SEQ ID NO: 184525 - DNA, 25 bp, Saccharomyces pastorianus
gaacctagttctgaaattgatttaa

SEQ ID NO: 184526 - DNA, 25 bp, Saccharomyces pastorianus
gaagacacccaaatcactgaacaaa

SEQ ID NO: 184527 - DNA, 25 bp, Saccharomyces pastorianus
ggcaagaaacgagagaacctagttc

SEQ ID NO: 184528 - DNA, 25 bp, Saccharomyces pastorianus
ataatattataaatgattctgttcc

SEQ ID NO: 184529 - DNA, 25 bp, Saccharomyces pastorianus
taatattataaatgattctgttcct

SEQ ID NO: 184530 - DNA, 25 bp, Saccharomyces pastorianus
tataaatgattctgttcctcttttt

SEQ ID NO: 184531 - DNA, 25 bp, Saccharomyces pastorianus
attctgttcctctttttatatgttg

SEQ ID NO: 184532 - DNA, 25 bp, Saccharomyces pastorianus
tgattctgttcctctttttatatgt

SEQ ID NO: 184533 - DNA, 25 bp, Saccharomyces pastorianus
aaatgattctgttcctctttttata

SEQ ID NO: 184534 - DNA, 25 bp, Saccharomyces pastorianus
tattataaatgattctgttcctctt

SEQ ID NO: 184535 - DNA, 25 bp, Saccharomyces pastorianus
ttataaatgattctgttcctctttt

SEQ ID NO: 184536 - DNA, 25 bp, Saccharomyces pastorianus
atattataaatgattctgttcctct

SEQ ID NO: 184537 - DNA, 25 bp, Saccharomyces pastorianus
attataaatgattctgttcctcttt

SEQ ID NO: 184538 - DNA, 25 bp, Saccharomyces pastorianus
ataaatgattctgttcctcttttta

SEQ ID NO: 184539 - DNA, 25 bp, Saccharomyces pastorianus
tacgttactagtatattatcatata

SEQ ID NO: 184540 - DNA, 25 bp, Saccharomyces pastorianus
ttacgttactagtatattatcatat

SEQ ID NO: 184541 - DNA, 25 bp, Saccharomyces pastorianus
tagtatttacgttactagtatatta

SEQ ID NO: 184542 - DNA, 25 bp, Saccharomyces pastorianus
atttacgttactagtatattatcat

SEQ ID NO: 184543 - DNA, 25 bp, Saccharomyces pastorianus
cgttactagtatattatcatatacg

SEQ ID NO: 184544 - DNA, 25 bp, Saccharomyces pastorianus
tatttacgttactagtatattatca

SEQ ID NO: 184545 - DNA, 25 bp, Saccharomyces pastorianus
tttacgttactagtatattatcata

SEQ ID NO: 184546 - DNA, 25 bp, Saccharomyces pastorianus
acgttactagtatattatcatatac

SEQ ID NO: 184547 - DNA, 25 bp, Saccharomyces pastorianus
agtatttacgttactagtatattat

SEQ ID NO: 184548 - DNA, 25 bp, Saccharomyces pastorianus
ctatcatctactaactagtatttac

SEQ ID NO: 184549 - DNA, 25 bp, Saccharomyces pastorianus
gtatttacgttactagtatattatc

SEQ ID NO: 184550 - DNA, 25 bp, Saccharomyces pastorianus
aactatgccgggtctgtgagaactt

SEQ ID NO: 184551 - DNA, 25 bp, Saccharomyces pastorianus
acgactggtcagacttttatgccaa

SEQ ID NO: 184552 - DNA, 25 bp, Saccharomyces pastorianus
gaatgatgacaccagttgcactata

SEQ ID NO: 184553 - DNA, 25 bp, Saccharomyces pastorianus
gttgccctctcacacgatgtggata

SEQ ID NO: 184554 - DNA, 25 bp, Saccharomyces pastorianus
aaaggccacagacatgctgctcatg

SEQ ID NO: 184555 - DNA, 25 bp, Saccharomyces pastorianus
ggatagtcaagcctcgcacaaacga

SEQ ID NO: 184556 - DNA, 25 bp, Saccharomyces pastorianus
gatatcgatatccaacttcccgaag

SEQ ID NO: 184557 - DNA, 25 bp, Saccharomyces pastorianus
ggcgctaagatcttcgtgcagtact

SEQ ID NO: 184558 - DNA, 25 bp, Saccharomyces pastorianus
aagacgcttgggttcggcgctaaga

SEQ ID NO: 184559 - DNA, 25 bp, Saccharomyces pastorianus
gacatggtcatccagttatccgata

SEQ ID NO: 184560 - DNA, 25 bp, Saccharomyces pastorianus
atcttcttgagcaacaggcgatctt

SEQ ID NO: 184561 - DNA, 25 bp, Saccharomyces pastorianus
tatcaccccttttatcgtagaatat

SEQ ID NO: 184562 - DNA, 25 bp, Saccharomyces pastorianus
gtacttagtcgaaaacaacgtatgt

SEQ ID NO: 184563 - DNA, 25 bp, Saccharomyces pastorianus
aaccataatagttacacgttgtcca

SEQ ID NO: 184564 - DNA, 25 bp, Saccharomyces pastorianus
ttggcgatttgtttcatttcctggc

SEQ ID NO: 184565 - DNA, 25 bp, Saccharomyces pastorianus
gaaatatcttctacagtgacaattg

SEQ ID NO: 184566 - DNA, 25 bp, Saccharomyces pastorianus
catttcctggctatttagacaacta

SEQ ID NO: 184567 - DNA, 25 bp, Saccharomyces pastorianus
acgttgtccaatttcaatcatagca

SEQ ID NO: 184568 - DNA, 25 bp, Saccharomyces pastorianus
ttacccttaaatggctatttaccat

SEQ ID NO: 184569 - DNA, 25 bp, Saccharomyces pastorianus
gtttactttagacatgatacttgga

SEQ ID NO: 184570 - DNA, 25 bp, Saccharomyces pastorianus
ttttttactgcaccgaaatatcttc

SEQ ID NO: 184571 - DNA, 25 bp, Saccharomyces pastorianus
tttggttcaccaagcacaattttga

SEQ ID NO: 184572 - DNA, 25 bp, Saccharomyces pastorianus
gttagagacttcacacacttaccag

SEQ ID NO: 184573 - DNA, 25 bp, Saccharomyces pastorianus
gagacgcgctatccaaattacaaaa

SEQ ID NO: 184574 - DNA, 25 bp, Saccharomyces pastorianus
ggaactaccgttcttgcaagagcta

SEQ ID NO: 184575 - DNA, 25 bp, Saccharomyces pastorianus
tggatgatcaattcacgttccccta

SEQ ID NO: 184576 - DNA, 25 bp, Saccharomyces pastorianus
taacccgctagtttccatcgtggaa

SEQ ID NO: 184577 - DNA, 25 bp, Saccharomyces pastorianus
aaatggcctgccactttgcaaattc

SEQ ID NO: 184578 - DNA, 25 bp, Saccharomyces pastorianus
agcacgagcttgcattaccggcagt

SEQ ID NO: 184579 - DNA, 25 bp, Saccharomyces pastorianus
ttgccgcgattctcttctctaaaat

SEQ ID NO: 184580 - DNA, 25 bp, Saccharomyces pastorianus
acgttgagagcgctttccatcaaaa

SEQ ID NO: 184581 - DNA, 25 bp, Saccharomyces pastorianus
agattctaaaactggacggcttcgc

SEQ ID NO: 184582 - DNA, 25 bp, Saccharomyces pastorianus
gacggcttcgctcaacttagcaaat

SEQ ID NO: 184583 - DNA, 25 bp, Saccharomyces pastorianus
ggttctgacttttggtctgaactaa

SEQ ID NO: 184584 - DNA, 25 bp, Saccharomyces pastorianus
tttacctcttgttcggctgcggcaa

SEQ ID NO: 184585 - DNA, 25 bp, Saccharomyces pastorianus
taaacactttatcgtttgcaccctc

SEQ ID NO: 184586 - DNA, 25 bp, Saccharomyces pastorianus
gcgtcttcgagcttgtgtttgtcaa

SEQ ID NO: 184587 - DNA, 25 bp, Saccharomyces pastorianus
ttcctgtacaggcttttcaaattcc

SEQ ID NO: 184588 - DNA, 25 bp, Saccharomyces pastorianus
tcctcttcttcttttacctcttgtt

SEQ ID NO: 184589 - DNA, 25 bp, Saccharomyces pastorianus
ctgcggcaacaggtttctgttcttt

SEQ ID NO: 184590 - DNA, 25 bp, Saccharomyces pastorianus
ttttctgctgattttggttctgact

SEQ ID NO: 184591 - DNA, 25 bp, Saccharomyces pastorianus
tctacgtcgtcatcattcgcgtctt

SEQ ID NO: 184592 - DNA, 25 bp, Saccharomyces pastorianus
tagaggtatttccttctacgtcgtc

SEQ ID NO: 184593 - DNA, 25 bp, Saccharomyces pastorianus
attcttcatgaagtcttggagatca

SEQ ID NO: 184594 - DNA, 25 bp, Saccharomyces pastorianus
atttgccctaattgcagttgttgtt

SEQ ID NO: 184595 - DNA, 25 bp, Saccharomyces pastorianus
agttgttgttgttttctctgttgct

SEQ ID NO: 184596 - DNA, 25 bp, Saccharomyces pastorianus
tgttgttgttttctctgttgctcga

SEQ ID NO: 184597 - DNA, 25 bp, Saccharomyces pastorianus
gcagttgttgttgttttctctgttg

SEQ ID NO: 184598 - DNA, 25 bp, Saccharomyces pastorianus
ttgcagttgttgttgttttctctgt

SEQ ID NO: 184599 - DNA, 25 bp, Saccharomyces pastorianus
ttgccctaattgcagttgttgttgt

SEQ ID NO: 184600 - DNA, 25 bp, Saccharomyces pastorianus
gttgttttctctgttgctcgacatc

SEQ ID NO: 184601 - DNA, 25 bp, Saccharomyces pastorianus
gccctaattgcagttgttgttgttt

SEQ ID NO: 184602 - DNA, 25 bp, Saccharomyces pastorianus
ttgttttctctgttgctcgacatcc

SEQ ID NO: 184603 - DNA, 25 bp, Saccharomyces pastorianus
aattgcagttgttgttgttttctct

SEQ ID NO: 184604 - DNA, 25 bp, Saccharomyces pastorianus
tgttgttttctctgttgctcgacat

SEQ ID NO: 184605 - DNA, 25 bp, Saccharomyces pastorianus
aacagccgcgttggagcaaactaca

SEQ ID NO: 184606 - DNA, 25 bp, Saccharomyces pastorianus
agaagttagtacacgcagcgctata

SEQ ID NO: 184607 - DNA, 25 bp, Saccharomyces pastorianus
atttgatatcccatagcgcttggag

SEQ ID NO: 184608 - DNA, 25 bp, Saccharomyces pastorianus
atagggcacccaattgccactgaga

SEQ ID NO: 184609 - DNA, 25 bp, Saccharomyces pastorianus
aacagttgttccaagttctagggca

SEQ ID NO: 184610 - DNA, 25 bp, Saccharomyces pastorianus
ggcaacgatgctatcaccaagggta

SEQ ID NO: 184611 - DNA, 25 bp, Saccharomyces pastorianus
atagcccttggtagtgatgtctctt

SEQ ID NO: 184612 - DNA, 25 bp, Saccharomyces pastorianus
atatactacctggtgtccaatctcc

SEQ ID NO: 184613 - DNA, 25 bp, Saccharomyces pastorianus
caacctcaagtctcttcttcaagaa

SEQ ID NO: 184614 - DNA, 25 bp, Saccharomyces pastorianus
aagtggcgctgctataattccagaa

SEQ ID NO: 184615 - DNA, 25 bp, Saccharomyces pastorianus
atcggtatttgatgcctactccaag

SEQ ID NO: 184616 - DNA, 25 bp, Saccharomyces pastorianus
gagttgttctcgttgtgatgcaaga

SEQ ID NO: 184617 - DNA, 25 bp, Saccharomyces pastorianus
aacggtccccttgagactagcgatg

SEQ ID NO: 184618 - DNA, 25 bp, Saccharomyces pastorianus
agtcattttcgtcatttgcattcaa

SEQ ID NO: 184619 - DNA, 25 bp, Saccharomyces pastorianus
aagcgctttcacttgttgtgttctg

SEQ ID NO: 184620 - DNA, 25 bp, Saccharomyces pastorianus
ggtgttatcacattcaactcgatta

SEQ ID NO: 184621 - DNA, 25 bp, Saccharomyces pastorianus
tccaatttttatgaactacccgaag

SEQ ID NO: 184622 - DNA, 25 bp, Saccharomyces pastorianus
aaaaacgacgctgcacaggctttaa

SEQ ID NO: 184623 - DNA, 25 bp, Saccharomyces pastorianus
catagctctctctcgagtattgcaa

SEQ ID NO: 184624 - DNA, 25 bp, Saccharomyces pastorianus
gtttctttacgtctcacttatagtg

SEQ ID NO: 184625 - DNA, 25 bp, Saccharomyces pastorianus
caggctttaaaatgctctgtggtaa

SEQ ID NO: 184626 - DNA, 25 bp, Saccharomyces pastorianus
aacagttctttgcatgggaccaaac

SEQ ID NO: 184627 - DNA, 25 bp, Saccharomyces pastorianus
tactaatatcacgattattcttcat

SEQ ID NO: 184628 - DNA, 25 bp, Saccharomyces pastorianus
ctaatatcacgattattcttcattc

SEQ ID NO: 184629 - DNA, 25 bp, Saccharomyces pastorianus
tttactaatatcacgattattcttc

SEQ ID NO: 184630 - DNA, 25 bp, Saccharomyces pastorianus
atggaatctatatttctatttacta

SEQ ID NO: 184631 - DNA, 25 bp, Saccharomyces pastorianus
taatatcacgattattcttcattcc

SEQ ID NO: 184632 - DNA, 25 bp, Saccharomyces pastorianus
ttactaatatcacgattattcttca

SEQ ID NO: 184633 - DNA, 25 bp, Saccharomyces pastorianus
actaatatcacgattattcttcatt

SEQ ID NO: 184634 - DNA, 25 bp, Saccharomyces pastorianus
atttactaatatcacgattattctt

SEQ ID NO: 184635 - DNA, 25 bp, Saccharomyces pastorianus
tggaatctatatttctatttactaa

SEQ ID NO: 184636 - DNA, 25 bp, Saccharomyces pastorianus
tatttactaatatcacgattattct

SEQ ID NO: 184637 - DNA, 25 bp, Saccharomyces pastorianus
aatatcacgattattcttcattccg

SEQ ID NO: 184638 - DNA, 25 bp, Saccharomyces pastorianus
tgggtgatgggctggaaatccttat

SEQ ID NO: 184639 - DNA, 25 bp, Saccharomyces pastorianus
gatatgagccaggtacaaacggtaa

SEQ ID NO: 184640 - DNA, 25 bp, Saccharomyces pastorianus
ggacaatcaggttaatttcaaggat

SEQ ID NO: 184641 - DNA, 25 bp, Saccharomyces pastorianus
tcatcaaactggtgagagactcgtt

SEQ ID NO: 184642 - DNA, 25 bp, Saccharomyces pastorianus
tgggctggaaatccttattgtcacc

SEQ ID NO: 184643 - DNA, 25 bp, Saccharomyces pastorianus
tttcaaggatcgatatgagccaggt

SEQ ID NO: 184644 - DNA, 25 bp, Saccharomyces pastorianus
aggatcgatatgagccaggtacaaa

SEQ ID NO: 184645 - DNA, 25 bp, Saccharomyces pastorianus
ctggtgagagactcgttcacttctg

SEQ ID NO: 184646 - DNA, 25 bp, Saccharomyces pastorianus
gacatatacaagtgggtgatgggct

SEQ ID NO: 184647 - DNA, 25 bp, Saccharomyces pastorianus
aactggtgagagactcgttcacttc

SEQ ID NO: 184648 - DNA, 25 bp, Saccharomyces pastorianus
tgagccaggtacaaacggtaaagtc

SEQ ID NO: 184649 - DNA, 25 bp, Saccharomyces pastorianus
ggatccccttcgcaagaaagcggat

SEQ ID NO: 184650 - DNA, 25 bp, Saccharomyces pastorianus
gcccacacggattcatctttcaata

SEQ ID NO: 184651 - DNA, 25 bp, Saccharomyces pastorianus
ggaaccatgggttcccaacctgcat

SEQ ID NO: 184652 - DNA, 25 bp, Saccharomyces pastorianus
aaaggatgccgagtctccttggcaa

SEQ ID NO: 184653 - DNA, 25 bp, Saccharomyces pastorianus
ttctccgggcgaacaaagtcttaag

SEQ ID NO: 184654 - DNA, 25 bp, Saccharomyces pastorianus
gcatcgcagcctttgctgatatttt

SEQ ID NO: 184655 - DNA, 25 bp, Saccharomyces pastorianus
ggatgtaccgcctttagatatctta

SEQ ID NO: 184656 - DNA, 25 bp, Saccharomyces pastorianus
gttggtgtttttcatctagacgatc

SEQ ID NO: 184657 - DNA, 25 bp, Saccharomyces pastorianus
agacgatcatatttctccgggcgaa

SEQ ID NO: 184658 - DNA, 25 bp, Saccharomyces pastorianus
ttagaagtgaacaccggatcccctt

SEQ ID NO: 184659 - DNA, 25 bp, Saccharomyces pastorianus
atggcaatagcagccctcaggaatt

SEQ ID NO: 184660 - DNA, 25 bp, Saccharomyces pastorianus
tggatcaagacaccttaccggctat

SEQ ID NO: 184661 - DNA, 25 bp, Saccharomyces pastorianus
attgcgttagaagtcgcttactgga

SEQ ID NO: 184662 - DNA, 25 bp, Saccharomyces pastorianus
agtccggcgaactattctttgaacg

SEQ ID NO: 184663 - DNA, 25 bp, Saccharomyces pastorianus
ttttgtgccaaaatctcaagagcta

SEQ ID NO: 184664 - DNA, 25 bp, Saccharomyces pastorianus
aaatgtgtggtggagtctactgcaa

SEQ ID NO: 184665 - DNA, 25 bp, Saccharomyces pastorianus
caccttaccggctattgagattgtc

SEQ ID NO: 184666 - DNA, 25 bp, Saccharomyces pastorianus
attctagttttacagcaagcgatat

SEQ ID NO: 184667 - DNA, 25 bp, Saccharomyces pastorianus
aattttgcaagagaccattacggta

SEQ ID NO: 184668 - DNA, 25 bp, Saccharomyces pastorianus
atcaaatccattttcttaccattat

SEQ ID NO: 184669 - DNA, 25 bp, Saccharomyces pastorianus
gataacagtccaaacagtccggcga

SEQ ID NO: 184670 - DNA, 25 bp, Saccharomyces pastorianus
aattttccgcaattttgtgcaagca

SEQ ID NO: 184671 - DNA, 25 bp, Saccharomyces pastorianus
gtcgcagttcgacaaggttattcac

SEQ ID NO: 184672 - DNA, 25 bp, Saccharomyces pastorianus
gcacttgcacgggtgaacacggtgt

SEQ ID NO: 184673 - DNA, 25 bp, Saccharomyces pastorianus
gaacccctgaagaacacgaaacctg

SEQ ID NO: 184674 - DNA, 25 bp, Saccharomyces pastorianus
gaaacctgtagccaacttgttgaca

SEQ ID NO: 184675 - DNA, 25 bp, Saccharomyces pastorianus
gctagtaagctgatcaacgccattg

SEQ ID NO: 184676 - DNA, 25 bp, Saccharomyces pastorianus
gagcactgaacgcagaaggcacttg

SEQ ID NO: 184677 - DNA, 25 bp, Saccharomyces pastorianus
attaagctagctattgacccaaaga

SEQ ID NO: 184678 - DNA, 25 bp, Saccharomyces pastorianus
tggtaacttccatgcattcatcgtc

SEQ ID NO: 184679 - DNA, 25 bp, Saccharomyces pastorianus
attcatcgtctacagaacccctgaa

SEQ ID NO: 184680 - DNA, 25 bp, Saccharomyces pastorianus
ggtgaagcacccgtcgatttgatga

SEQ ID NO: 184681 - DNA, 25 bp, Saccharomyces pastorianus
aactgatgtagctgttcctgtgtcg

SEQ ID NO: 184682 - DNA, 25 bp, Saccharomyces pastorianus
tgatcctgattatacacctcaaagg

SEQ ID NO: 184683 - DNA, 25 bp, Saccharomyces pastorianus
atttgtttgatcctgattatacacc

SEQ ID NO: 184684 - DNA, 25 bp, Saccharomyces pastorianus
ttatgtcattacaggaggatgtgat

SEQ ID NO: 184685 - DNA, 25 bp, Saccharomyces pastorianus
gattatacacctcaaaggaccacgt

SEQ ID NO: 184686 - DNA, 25 bp, Saccharomyces pastorianus
atgatcagagtttataacttagtaa

SEQ ID NO: 184687 - DNA, 25 bp, Saccharomyces pastorianus
ttatacacctcaaaggaccacgtta

SEQ ID NO: 184688 - DNA, 25 bp, Saccharomyces pastorianus
ttgtttgatcctgattatacacctc

SEQ ID NO: 184689 - DNA, 25 bp, Saccharomyces pastorianus
gttttggtaaatttgtttgatcctg

SEQ ID NO: 184690 - DNA, 25 bp, Saccharomyces pastorianus
tgtcattacaggaggatgtgataaa

SEQ ID NO: 184691 - DNA, 25 bp, Saccharomyces pastorianus
ggtaaatttgtttgatcctgattat

SEQ ID NO: 184692 - DNA, 25 bp, Saccharomyces pastorianus
gtttgatcctgattatacacctcaa

SEQ ID NO: 184693 - DNA, 25 bp, Saccharomyces pastorianus
tgaaatcaattctagctctataata

SEQ ID NO: 184694 - DNA, 25 bp, Saccharomyces pastorianus
tccaaggaaggtcagtatgaaatca

SEQ ID NO: 184695 - DNA, 25 bp, Saccharomyces pastorianus
gaaggtcagtatgaaatcaattcta

SEQ ID NO: 184696 - DNA, 25 bp, Saccharomyces pastorianus
gtccaaggaaggtcagtatgaaatc

SEQ ID NO: 184697 - DNA, 25 bp, Saccharomyces pastorianus
aaatcaattctagctctataataaa

SEQ ID NO: 184698 - DNA, 25 bp, Saccharomyces pastorianus
gaaatcaattctagctctataataa

SEQ ID NO: 184699 - DNA, 25 bp, Saccharomyces pastorianus
atcaattctagctctataataaaag

SEQ ID NO: 184700 - DNA, 25 bp, Saccharomyces pastorianus
ggaaggtcagtatgaaatcaattct

SEQ ID NO: 184701 - DNA, 25 bp, Saccharomyces pastorianus
tgtccaaggaaggtcagtatgaaat

SEQ ID NO: 184702 - DNA, 25 bp, Saccharomyces pastorianus
ccaaggaaggtcagtatgaaatcaa

SEQ ID NO: 184703 - DNA, 25 bp, Saccharomyces pastorianus
atgtccaaggaaggtcagtatgaaa

SEQ ID NO: 184704 - DNA, 25 bp, Saccharomyces pastorianus
tcattatgcacggcacttgcctcag

SEQ ID NO: 184705 - DNA, 25 bp, Saccharomyces pastorianus
cgcatcattatgcacggcacttgcc

SEQ ID NO: 184706 - DNA, 25 bp, Saccharomyces pastorianus
tcgcatcattatgcacggcacttgc

SEQ ID NO: 184707 - DNA, 25 bp, Saccharomyces pastorianus
ttcgcatcattatgcacggcacttg

SEQ ID NO: 184708 - DNA, 25 bp, Saccharomyces pastorianus
gcatcattatgcacggcacttgcct

SEQ ID NO: 184709 - DNA, 25 bp, Saccharomyces pastorianus
atcattatgcacggcacttgcctca

SEQ ID NO: 184710 - DNA, 25 bp, Saccharomyces pastorianus
cattcgcatcattatgcacggcact

SEQ ID NO: 184711 - DNA, 25 bp, Saccharomyces pastorianus
attcgcatcattatgcacggcactt

SEQ ID NO: 184712 - DNA, 25 bp, Saccharomyces pastorianus
catcattatgcacggcacttgcctc

SEQ ID NO: 184713 - DNA, 25 bp, Saccharomyces pastorianus
ttacaagcacagtaccggagagtac

SEQ ID NO: 184714 - DNA, 25 bp, Saccharomyces pastorianus
tttgtattcctatctctttcggagg

SEQ ID NO: 184715 - DNA, 25 bp, Saccharomyces pastorianus
ttactttgtattcctatctctttcg

SEQ ID NO: 184716 - DNA, 25 bp, Saccharomyces pastorianus
tgtattcctatctctttcggagggt

SEQ ID NO: 184717 - DNA, 25 bp, Saccharomyces pastorianus
gagggtttttacctggctgggatag

SEQ ID NO: 184718 - DNA, 25 bp, Saccharomyces pastorianus
acctgactatctatttactttgtat

SEQ ID NO: 184719 - DNA, 25 bp, Saccharomyces pastorianus
actttgtattcctatctctttcgga

SEQ ID NO: 184720 - DNA, 25 bp, Saccharomyces pastorianus
gggatacctgactatctatttactt

SEQ ID NO: 184721 - DNA, 25 bp, Saccharomyces pastorianus
gagaggatttttgggatacctgact

SEQ ID NO: 184722 - DNA, 25 bp, Saccharomyces pastorianus
tattcctatctctttcggagggttt

SEQ ID NO: 184723 - DNA, 25 bp, Saccharomyces pastorianus
ggatttttgggatacctgactatct

SEQ ID NO: 184724 - DNA, 25 bp, Saccharomyces pastorianus
gataaccttcgttgcattgacggct

SEQ ID NO: 184725 - DNA, 25 bp, Saccharomyces pastorianus
attgacggctagattctttaaccta

SEQ ID NO: 184726 - DNA, 25 bp, Saccharomyces pastorianus
gccaataatagttccttccctgata

SEQ ID NO: 184727 - DNA, 25 bp, Saccharomyces pastorianus
atgtacttgataaccttcgttgcat

SEQ ID NO: 184728 - DNA, 25 bp, Saccharomyces pastorianus
tagctgccgcctcggccaataatag

SEQ ID NO: 184729 - DNA, 25 bp, Saccharomyces pastorianus
gttccttccctgatattgaccttac

SEQ ID NO: 184730 - DNA, 25 bp, Saccharomyces pastorianus
tagattctttaacctagctgccgcc

SEQ ID NO: 184731 - DNA, 25 bp, Saccharomyces pastorianus
atagttccttccctgatattgacct

SEQ ID NO: 184732 - DNA, 25 bp, Saccharomyces pastorianus
aaccttcgttgcattgacggctaga

SEQ ID NO: 184733 - DNA, 25 bp, Saccharomyces pastorianus
tgcattgacggctagattctttaac

SEQ ID NO: 184734 - DNA, 25 bp, Saccharomyces pastorianus
tcggccaataatagttccttccctg

SEQ ID NO: 184735 - DNA, 25 bp, Saccharomyces pastorianus
atagtgcattttctgcagcctcaga

SEQ ID NO: 184736 - DNA, 25 bp, Saccharomyces pastorianus
aacatgactgtggttccctattgca

SEQ ID NO: 184737 - DNA, 25 bp, Saccharomyces pastorianus
ggcacaggccatggtatcggatcat

SEQ ID NO: 184738 - DNA, 25 bp, Saccharomyces pastorianus
gactccggttcgcaattcttggagg

SEQ ID NO: 184739 - DNA, 25 bp, Saccharomyces pastorianus
gtcccgcgggttagattacaaacat

SEQ ID NO: 184740 - DNA, 25 bp, Saccharomyces pastorianus
tctgatgaatttccccttaagagcg

SEQ ID NO: 184741 - DNA, 25 bp, Saccharomyces pastorianus
gggtttaatatcgacgccatcgcta

SEQ ID NO: 184742 - DNA, 25 bp, Saccharomyces pastorianus
cggctttaggccacatctgatgaat

SEQ ID NO: 184743 - DNA, 25 bp, Saccharomyces pastorianus
aaggacccatgggtgtcggctttag

SEQ ID NO: 184744 - DNA, 25 bp, Saccharomyces pastorianus
gccctagagaggttgatttttcccg

SEQ ID NO: 184745 - DNA, 25 bp, Saccharomyces pastorianus
cgctaggcagtttttatggtcccgc

SEQ ID NO: 184746 - DNA, 25 bp, Saccharomyces pastorianus
ctttgcattacaagtgcaacgctct

SEQ ID NO: 184747 - DNA, 25 bp, Saccharomyces pastorianus
cgacctttgcattacaagtgcaacg

SEQ ID NO: 184748 - DNA, 25 bp, Saccharomyces pastorianus
tagcgacctttgcattacaagtgca

SEQ ID NO: 184749 - DNA, 25 bp, Saccharomyces pastorianus
acctttgcattacaagtgcaacgct

SEQ ID NO: 184750 - DNA, 25 bp, Saccharomyces pastorianus
agcgacctttgcattacaagtgcaa

SEQ ID NO: 184751 - DNA, 25 bp, Saccharomyces pastorianus
gcattacaagtgcaacgctctacca

SEQ ID NO: 184752 - DNA, 25 bp, Saccharomyces pastorianus
acaagtgcaacgctctaccactaag

SEQ ID NO: 184753 - DNA, 25 bp, Saccharomyces pastorianus
gcgacctttgcattacaagtgcaac

SEQ ID NO: 184754 - DNA, 25 bp, Saccharomyces pastorianus
attacaagtgcaacgctctaccact

SEQ ID NO: 184755 - DNA, 25 bp, Saccharomyces pastorianus
gacctttgcattacaagtgcaacgc

SEQ ID NO: 184756 - DNA, 25 bp, Saccharomyces pastorianus
ctagcgacctttgcattacaagtgc

SEQ ID NO: 184757 - DNA, 25 bp, Saccharomyces pastorianus
aagtttcaggctttctttttcatca

SEQ ID NO: 184758 - DNA, 25 bp, Saccharomyces pastorianus
tttcagaagtttcaggctttctttt

SEQ ID NO: 184759 - DNA, 25 bp, Saccharomyces pastorianus
gttttcagaagtttcaggctttctt

SEQ ID NO: 184760 - DNA, 25 bp, Saccharomyces pastorianus
tgccattttttgttaatgttaaaat

SEQ ID NO: 184761 - DNA, 25 bp, Saccharomyces pastorianus
taaaatttccaaatctgttttcaga

SEQ ID NO: 184762 - DNA, 25 bp, Saccharomyces pastorianus
aaatttccaaatctgttttcagaag

SEQ ID NO: 184763 - DNA, 25 bp, Saccharomyces pastorianus
ctgttttcagaagtttcaggctttc

SEQ ID NO: 184764 - DNA, 25 bp, Saccharomyces pastorianus
caggctttctttttcatcattccaa

SEQ ID NO: 184765 - DNA, 25 bp, Saccharomyces pastorianus
tcagaagtttcaggctttctttttc

SEQ ID NO: 184766 - DNA, 25 bp, Saccharomyces pastorianus
gaagtttcaggctttctttttcatc

SEQ ID NO: 184767 - DNA, 25 bp, Saccharomyces pastorianus
atctgttttcagaagtttcaggctt

SEQ ID NO: 184768 - DNA, 25 bp, Saccharomyces pastorianus
aaagatggaaaacgcgaaatggaga

SEQ ID NO: 184769 - DNA, 25 bp, Saccharomyces pastorianus
gctctattgaaacagcaaagacaaa

SEQ ID NO: 184770 - DNA, 25 bp, Saccharomyces pastorianus
caaattgcacgaagtccgtcacgaa

SEQ ID NO: 184771 - DNA, 25 bp, Saccharomyces pastorianus
aattgcacgaagtccgtcacgaaag

SEQ ID NO: 184772 - DNA, 25 bp, Saccharomyces pastorianus
attgcacgaagtccgtcacgaaaga

SEQ ID NO: 184773 - DNA, 25 bp, Saccharomyces pastorianus
aaaagctgaacttcagagagctgca

SEQ ID NO: 184774 - DNA, 25 bp, Saccharomyces pastorianus
acgaagtccgtcacgaaagatggaa

SEQ ID NO: 184775 - DNA, 25 bp, Saccharomyces pastorianus
gtccgtcacgaaagatggaaaacgc

SEQ ID NO: 184776 - DNA, 25 bp, Saccharomyces pastorianus
aaagacaaattgcacgaagtccgtc

SEQ ID NO: 184777 - DNA, 25 bp, Saccharomyces pastorianus
gctgaacttcagagagctgcagctg

SEQ ID NO: 184778 - DNA, 25 bp, Saccharomyces pastorianus
tgcacgaagtccgtcacgaaagatg

SEQ ID NO: 184779 - DNA, 25 bp, Saccharomyces pastorianus
gcgattacttcaaaacgctctctaa

SEQ ID NO: 184780 - DNA, 25 bp, Saccharomyces pastorianus
aagagatatctctggtttgcccctc

SEQ ID NO: 184781 - DNA, 25 bp, Saccharomyces pastorianus
atatctctggtttgcccctcatgat

SEQ ID NO: 184782 - DNA, 25 bp, Saccharomyces pastorianus
cccatcaagggcaagataattcatt

SEQ ID NO: 184783 - DNA, 25 bp, Saccharomyces pastorianus
tgcatatagggacttcagaggatct

SEQ ID NO: 184784 - DNA, 25 bp, Saccharomyces pastorianus
gctcttaagccccatcaagggcaag

SEQ ID NO: 184785 - DNA, 25 bp, Saccharomyces pastorianus
aacgctctctaaagttgcatatagg

SEQ ID NO: 184786 - DNA, 25 bp, Saccharomyces pastorianus
aaagtttgcaggctcttaagcccca

SEQ ID NO: 184787 - DNA, 25 bp, Saccharomyces pastorianus
aattcattgttgctgtatgtggaca

SEQ ID NO: 184788 - DNA, 25 bp, Saccharomyces pastorianus
cattgttgctgtatgtggacattaa

SEQ ID NO: 184789 - DNA, 25 bp, Saccharomyces pastorianus
acttttatcgtagagatcatggacg

SEQ ID NO: 184790 - DNA, 25 bp, Saccharomyces pastorianus
atttagcgaggcaacttcggacatt

SEQ ID NO: 184791 - DNA, 25 bp, Saccharomyces pastorianus
gctaggattatccacatcttcgaaa

SEQ ID NO: 184792 - DNA, 25 bp, Saccharomyces pastorianus
ataaactcatacatgtctcctcttc

SEQ ID NO: 184793 - DNA, 25 bp, Saccharomyces pastorianus
gtcatattcatctagcgccgttatc

SEQ ID NO: 184794 - DNA, 25 bp, Saccharomyces pastorianus
aatcctcgtcatcaatatcatcttc

SEQ ID NO: 184795 - DNA, 25 bp, Saccharomyces pastorianus
ccccgttggttttcagattcatcat

SEQ ID NO: 184796 - DNA, 25 bp, Saccharomyces pastorianus
ttctagtccttcatcatttagcgag

SEQ ID NO: 184797 - DNA, 25 bp, Saccharomyces pastorianus
atcttctggttctacgacgtcatat

SEQ ID NO: 184798 - DNA, 25 bp, Saccharomyces pastorianus
atgcacgctagtatctgccatgcta

SEQ ID NO: 184799 - DNA, 25 bp, Saccharomyces pastorianus
ttgtcgctactgttttcatcttcta

SEQ ID NO: 184800 - DNA, 25 bp, Saccharomyces pastorianus
tgggaatcgcctaacatcttctggt

SEQ ID NO: 184801 - DNA, 25 bp, Saccharomyces pastorianus
ggcttactgcctccacggaaaagaa

SEQ ID NO: 184802 - DNA, 25 bp, Saccharomyces pastorianus
attttccgcgaattaaccagtgatt

SEQ ID NO: 184803 - DNA, 25 bp, Saccharomyces pastorianus
gacactttgatttcattctacgcat

SEQ ID NO: 184804 - DNA, 25 bp, Saccharomyces pastorianus
gaaacttcacgactggctggttacc

SEQ ID NO: 184805 - DNA, 25 bp, Saccharomyces pastorianus
gcgttggcagagaattgtccttatt

SEQ ID NO: 184806 - DNA, 25 bp, Saccharomyces pastorianus
gagttcgaagccagaccatgctaaa

SEQ ID NO: 184807 - DNA, 25 bp, Saccharomyces pastorianus
accttcgagggctgataccttctaa

SEQ ID NO: 184808 - DNA, 25 bp, Saccharomyces pastorianus
gcaagttagccgttccaggaggtac

SEQ ID NO: 184809 - DNA, 25 bp, Saccharomyces pastorianus
gagagcactcagaagaccgcatttg

SEQ ID NO: 184810 - DNA, 25 bp, Saccharomyces pastorianus
gctaaacatgctgcgcttctgatta

SEQ ID NO: 184811 - DNA, 25 bp, Saccharomyces pastorianus
gagactcgctgcaaagactctgggc

SEQ ID NO: 184812 - DNA, 25 bp, Saccharomyces pastorianus
gtagagcctcaagagccatactgga

SEQ ID NO: 184813 - DNA, 25 bp, Saccharomyces pastorianus
gattcattgtctttgcggtgggata

SEQ ID NO: 184814 - DNA, 25 bp, Saccharomyces pastorianus
accgcactgagtggtaccattgcta

SEQ ID NO: 184815 - DNA, 25 bp, Saccharomyces pastorianus
gaatatcccatttgcagcgttcaat

SEQ ID NO: 184816 - DNA, 25 bp, Saccharomyces pastorianus
gctaccattgctgcggatgcattga

SEQ ID NO: 184817 - DNA, 25 bp, Saccharomyces pastorianus
aagtggtgcaacatgtgctgcgtta

SEQ ID NO: 184818 - DNA, 25 bp, Saccharomyces pastorianus
gctttgcagcattttactactccta

SEQ ID NO: 184819 - DNA, 25 bp, Saccharomyces pastorianus
tgctgcgttaactacaccgttggat

SEQ ID NO: 184820 - DNA, 25 bp, Saccharomyces pastorianus
gatgcattgatgaacccctttgaca

SEQ ID NO: 184821 - DNA, 25 bp, Saccharomyces pastorianus
aatctgccagcaaattcttcaaccc

SEQ ID NO: 184822 - DNA, 25 bp, Saccharomyces pastorianus
gaggcagcgaaactgtctccatcga

SEQ ID NO: 184823 - DNA, 25 bp, Saccharomyces pastorianus
gaaatcgatctagctccaaaatggc

SEQ ID NO: 184824 - DNA, 25 bp, Saccharomyces pastorianus
tcgatctagctccaaaatggcccaa

SEQ ID NO: 184825 - DNA, 25 bp, Saccharomyces pastorianus
taccccagggatgaaatcgatctag

SEQ ID NO: 184826 - DNA, 25 bp, Saccharomyces pastorianus
gtggctataccccagggatgaaatc

SEQ ID NO: 184827 - DNA, 25 bp, Saccharomyces pastorianus
tataccccagggatgaaatcgatct

SEQ ID NO: 184828 - DNA, 25 bp, Saccharomyces pastorianus
atgaaatcgatctagctccaaaatg

SEQ ID NO: 184829 - DNA, 25 bp, Saccharomyces pastorianus
cccagggatgaaatcgatctagctc

SEQ ID NO: 184830 - DNA, 25 bp, Saccharomyces pastorianus
ttagagtggctataccccagggatg

SEQ ID NO: 184831 - DNA, 25 bp, Saccharomyces pastorianus
agagtggctataccccagggatgaa

SEQ ID NO: 184832 - DNA, 25 bp, Saccharomyces pastorianus
aatcgatctagctccaaaatggccc

SEQ ID NO: 184833 - DNA, 25 bp, Saccharomyces pastorianus
cgatctagctccaaaatggcccaag

SEQ ID NO: 184834 - DNA, 25 bp, Saccharomyces pastorianus
ggaaaattcttcctctgtttttgat

SEQ ID NO: 184835 - DNA, 25 bp, Saccharomyces pastorianus
ttgaacccagactaaacctgtcctt

SEQ ID NO: 184836 - DNA, 25 bp, Saccharomyces pastorianus
gaggattgcgaccaatttatgtcat

SEQ ID NO: 184837 - DNA, 25 bp, Saccharomyces pastorianus
ggtaacgaattcatccaactgggta

SEQ ID NO: 184838 - DNA, 25 bp, Saccharomyces pastorianus
gatagtgcaccgttaaccaggttga

SEQ ID NO: 184839 - DNA, 25 bp, Saccharomyces pastorianus
gtatgcgagtttccttacactttag

SEQ ID NO: 184840 - DNA, 25 bp, Saccharomyces pastorianus
catctcgttattcagcttacattaa

SEQ ID NO: 184841 - DNA, 25 bp, Saccharomyces pastorianus
gagagcttccttcgtgaggcagaaa

SEQ ID NO: 184842 - DNA, 25 bp, Saccharomyces pastorianus
gtcgcagctaaagaggcactaattg

SEQ ID NO: 184843 - DNA, 25 bp, Saccharomyces pastorianus
accaggttgaacttcgtatgcgagt

SEQ ID NO: 184844 - DNA, 25 bp, Saccharomyces pastorianus
aagtttccaaggcaggtcattgatc

SEQ ID NO: 184845 - DNA, 25 bp, Saccharomyces pastorianus
gaaagttcttctgcaagatacagga

SEQ ID NO: 184846 - DNA, 25 bp, Saccharomyces pastorianus
ttatatgtttcactatcctactatt

SEQ ID NO: 184847 - DNA, 25 bp, Saccharomyces pastorianus
gggaatcaatatatctacctaatag

SEQ ID NO: 184848 - DNA, 25 bp, Saccharomyces pastorianus
tatcctactatttcatcgatcctct

SEQ ID NO: 184849 - DNA, 25 bp, Saccharomyces pastorianus
gttcttctgcaagatacaggaatcc

SEQ ID NO: 184850 - DNA, 25 bp, Saccharomyces pastorianus
tattgttacaggctacgatattgcg

SEQ ID NO: 184851 - DNA, 25 bp, Saccharomyces pastorianus
tctgcaagatacaggaatccaaagg

SEQ ID NO: 184852 - DNA, 25 bp, Saccharomyces pastorianus
gtttcactatcctactatttcatcg

SEQ ID NO: 184853 - DNA, 25 bp, Saccharomyces pastorianus
gttacaggctacgatattgcgtata

SEQ ID NO: 184854 - DNA, 25 bp, Saccharomyces pastorianus
tcctactatttcatcgatcctctta

SEQ ID NO: 184855 - DNA, 25 bp, Saccharomyces pastorianus
caggctacgatattgcgtatagaaa

SEQ ID NO: 184856 - DNA, 25 bp, Saccharomyces pastorianus
ttacaacaatgactatggcaagcaa

SEQ ID NO: 184857 - DNA, 25 bp, Saccharomyces pastorianus
atatggctactagtactactacgac

SEQ ID NO: 184858 - DNA, 25 bp, Saccharomyces pastorianus
tatggcaagcaatatggctactagt

SEQ ID NO: 184859 - DNA, 25 bp, Saccharomyces pastorianus
ggcaagcaatatggctactagtact

SEQ ID NO: 184860 - DNA, 25 bp, Saccharomyces pastorianus
aatgactatggcaagcaatatggct

SEQ ID NO: 184861 - DNA, 25 bp, Saccharomyces pastorianus
gactatggcaagcaatatggctact

SEQ ID NO: 184862 - DNA, 25 bp, Saccharomyces pastorianus
caacaatgactatggcaagcaatat

SEQ ID NO: 184863 - DNA, 25 bp, Saccharomyces pastorianus
caatatggctactagtactactacg

SEQ ID NO: 184864 - DNA, 25 bp, Saccharomyces pastorianus
atggctactagtactactacgacgg

SEQ ID NO: 184865 - DNA, 25 bp, Saccharomyces pastorianus
agcaatatggctactagtactacta

SEQ ID NO: 184866 - DNA, 25 bp, Saccharomyces pastorianus
ggctactagtactactacgacggct

SEQ ID NO: 184867 - DNA, 25 bp, Saccharomyces pastorianus
atttcagggacaagggctgccacaa

SEQ ID NO: 184868 - DNA, 25 bp, Saccharomyces pastorianus
gaatactgatgccacgcgtatcgca

SEQ ID NO: 184869 - DNA, 25 bp, Saccharomyces pastorianus
atgattgggtctccaccatacactc

SEQ ID NO: 184870 - DNA, 25 bp, Saccharomyces pastorianus
cctggttccgaatactctttagcaa

SEQ ID NO: 184871 - DNA, 25 bp, Saccharomyces pastorianus
gacccgaaccctgcaactagatata

SEQ ID NO: 184872 - DNA, 25 bp, Saccharomyces pastorianus
ctatgccctcggaatcatgttgatt

SEQ ID NO: 184873 - DNA, 25 bp, Saccharomyces pastorianus
catacactccgccagaggtaatgta

SEQ ID NO: 184874 - DNA, 25 bp, Saccharomyces pastorianus
gaggtaatgtacttcgatgccaaga

SEQ ID NO: 184875 - DNA, 25 bp, Saccharomyces pastorianus
atccccttcatcgattcttgtaaca

SEQ ID NO: 184876 - DNA, 25 bp, Saccharomyces pastorianus
tgccaagaagcactaccccgaaaag

SEQ ID NO: 184877 - DNA, 25 bp, Saccharomyces pastorianus
gattaacaatatcatccccttcatc

SEQ ID NO: 184878 - DNA, 25 bp, Saccharomyces pastorianus
tgactaaacaggaggacaaagcatg

SEQ ID NO: 184879 - DNA, 25 bp, Saccharomyces pastorianus
ttcctgactaaacaggaggacaaag

SEQ ID NO: 184880 - DNA, 25 bp, Saccharomyces pastorianus
tgggcgacttcctgactaaacagga

SEQ ID NO: 184881 - DNA, 25 bp, Saccharomyces pastorianus
cttcctgactaaacaggaggacaaa

SEQ ID NO: 184882 - DNA, 25 bp, Saccharomyces pastorianus
acttcctgactaaacaggaggacaa

SEQ ID NO: 184883 - DNA, 25 bp, Saccharomyces pastorianus
gggcgacttcctgactaaacaggag

SEQ ID NO: 184884 - DNA, 25 bp, Saccharomyces pastorianus
gactaaacaggaggacaaagcatgc

SEQ ID NO: 184885 - DNA, 25 bp, Saccharomyces pastorianus
ctgactaaacaggaggacaaagcat

SEQ ID NO: 184886 - DNA, 25 bp, Saccharomyces pastorianus
cgacttcctgactaaacaggaggac

SEQ ID NO: 184887 - DNA, 25 bp, Saccharomyces pastorianus
taaacaggaggacaaagcatgcgag

SEQ ID NO: 184888 - DNA, 25 bp, Saccharomyces pastorianus
gacttcctgactaaacaggaggaca

SEQ ID NO: 184889 - DNA, 25 bp, Saccharomyces pastorianus
tcaactttggcagcacaatttcacg

SEQ ID NO: 184890 - DNA, 25 bp, Saccharomyces pastorianus
gatcatccacgtaagtggcaccgta

SEQ ID NO: 184891 - DNA, 25 bp, Saccharomyces pastorianus
agagccgcggtcattttgttagcat

SEQ ID NO: 184892 - DNA, 25 bp, Saccharomyces pastorianus
tgcaacagccactttatttttaaga

SEQ ID NO: 184893 - DNA, 25 bp, Saccharomyces pastorianus
atggatcatccacgtaagtggcacc

SEQ ID NO: 184894 - DNA, 25 bp, Saccharomyces pastorianus
ttgcaacagccactttatttttaag

SEQ ID NO: 184895 - DNA, 25 bp, Saccharomyces pastorianus
ttgttagcatctcttctcaactttg

SEQ ID NO: 184896 - DNA, 25 bp, Saccharomyces pastorianus
gtaagtggcaccgtaagctcgtcaa

SEQ ID NO: 184897 - DNA, 25 bp, Saccharomyces pastorianus
attgcaacagccactttatttttaa

SEQ ID NO: 184898 - DNA, 25 bp, Saccharomyces pastorianus
cgtaagctcgtcaattgcaacagcc

SEQ ID NO: 184899 - DNA, 25 bp, Saccharomyces pastorianus
gccactttatttttaagagccgcgg

SEQ ID NO: 184900 - DNA, 25 bp, Saccharomyces pastorianus
atatccggagcgtatgctgccaata

SEQ ID NO: 184901 - DNA, 25 bp, Saccharomyces pastorianus
tttaggcggtgttgctaccacagca

SEQ ID NO: 184902 - DNA, 25 bp, Saccharomyces pastorianus
gtacaagtaatctaggtagcacctc

SEQ ID NO: 184903 - DNA, 25 bp, Saccharomyces pastorianus
gcagttgcattgatcgcaggttgtt

SEQ ID NO: 184904 - DNA, 25 bp, Saccharomyces pastorianus
gtgccagtgggttcttaatcacgct

SEQ ID NO: 184905 - DNA, 25 bp, Saccharomyces pastorianus
tagcacctcatgttgggttggagct

SEQ ID NO: 184906 - DNA, 25 bp, Saccharomyces pastorianus
atgccgcagtgattgcttcacctat

SEQ ID NO: 184907 - DNA, 25 bp, Saccharomyces pastorianus
aaaactactattgggcgttggctgg

SEQ ID NO: 184908 - DNA, 25 bp, Saccharomyces pastorianus
aatcacgctagcaggaatatccgga

SEQ ID NO: 184909 - DNA, 25 bp, Saccharomyces pastorianus
ttcacctatggtgggcaatcatcta

SEQ ID NO: 184910 - DNA, 25 bp, Saccharomyces pastorianus
aaagctttagtcgatgccgcagtga

SEQ ID NO: 184911 - DNA, 25 bp, Saccharomyces pastorianus
actttgcgagagtagatgaactatg

SEQ ID NO: 184912 - DNA, 25 bp, Saccharomyces pastorianus
aaagagtcagtaccctacatcgagg

SEQ ID NO: 184913 - DNA, 25 bp, Saccharomyces pastorianus
catcgaggaggctttgcaggtctac

SEQ ID NO: 184914 - DNA, 25 bp, Saccharomyces pastorianus
gtaccctacatcgaggaggctttgc

SEQ ID NO: 184915 - DNA, 25 bp, Saccharomyces pastorianus
gtcagtaccctacatcgaggaggct

SEQ ID NO: 184916 - DNA, 25 bp, Saccharomyces pastorianus
aatcatttaaagagtcagtacccta

SEQ ID NO: 184917 - DNA, 25 bp, Saccharomyces pastorianus
gagtagatgaactatggaatcaggt

SEQ ID NO: 184918 - DNA, 25 bp, Saccharomyces pastorianus
cgaggaggctttgcaggtctacttt

SEQ ID NO: 184919 - DNA, 25 bp, Saccharomyces pastorianus
gaggctttgcaggtctactttgcga

SEQ ID NO: 184920 - DNA, 25 bp, Saccharomyces pastorianus
ggctttgcaggtctactttgcgaga

SEQ ID NO: 184921 - DNA, 25 bp, Saccharomyces pastorianus
tttgcaggtctactttgcgagagta

SEQ ID NO: 184922 - DNA, 25 bp, Saccharomyces pastorianus
tacggctgtagggtcattcaaagat

SEQ ID NO: 184923 - DNA, 25 bp, Saccharomyces pastorianus
gttttgcaacaagatcagttcacca

SEQ ID NO: 184924 - DNA, 25 bp, Saccharomyces pastorianus
gaaaaatctattctttatggctcta

SEQ ID NO: 184925 - DNA, 25 bp, Saccharomyces pastorianus
tcttaagttctttaactggccacat

SEQ ID NO: 184926 - DNA, 25 bp, Saccharomyces pastorianus
tcaatttgccaactatgtgattcaa

SEQ ID NO: 184927 - DNA, 25 bp, Saccharomyces pastorianus
aagacgattctccaatgattttaat

SEQ ID NO: 184928 - DNA, 25 bp, Saccharomyces pastorianus
taaatttgcctccaacgtggtcgaa

SEQ ID NO: 184929 - DNA, 25 bp, Saccharomyces pastorianus
aattagttaatgtctctgagggtga

SEQ ID NO: 184930 - DNA, 25 bp, Saccharomyces pastorianus
gaaattgatcgtcattgccattaga

SEQ ID NO: 184931 - DNA, 25 bp, Saccharomyces pastorianus
aactgtggccaataatgttgtcgaa

SEQ ID NO: 184932 - DNA, 25 bp, Saccharomyces pastorianus
aatcatgctttgaatctggaagacg

SEQ ID NO: 184933 - DNA, 25 bp, Saccharomyces pastorianus
aatattttgccaagaatggtaaaag

SEQ ID NO: 184934 - DNA, 25 bp, Saccharomyces pastorianus
gaatattttgccaagaatggtaaaa

SEQ ID NO: 184935 - DNA, 25 bp, Saccharomyces pastorianus
gaagaaagaatattttgccaagaat

SEQ ID NO: 184936 - DNA, 25 bp, Saccharomyces pastorianus
ggtaaaagaacaaccatggatggtg

SEQ ID NO: 184937 - DNA, 25 bp, Saccharomyces pastorianus
aagaagaaagaatattttgccaaga

SEQ ID NO: 184938 - DNA, 25 bp, Saccharomyces pastorianus
agaatattttgccaagaatggtaaa

SEQ ID NO: 184939 - DNA, 25 bp, Saccharomyces pastorianus
aaagaagaaagaatattttgccaag

SEQ ID NO: 184940 - DNA, 25 bp, Saccharomyces pastorianus
gaaagaatattttgccaagaatggt

SEQ ID NO: 184941 - DNA, 25 bp, Saccharomyces pastorianus
taaaagaacaaccatggatggtgac

SEQ ID NO: 184942 - DNA, 25 bp, Saccharomyces pastorianus
aaagaatattttgccaagaatggta

SEQ ID NO: 184943 - DNA, 25 bp, Saccharomyces pastorianus
tattttgccaagaatggtaaaagaa

SEQ ID NO: 184944 - DNA, 25 bp, Saccharomyces pastorianus
gtaagaacgatggatcattcatggg

SEQ ID NO: 184945 - DNA, 25 bp, Saccharomyces pastorianus
gcgcggacaactgaaatacgtgggt

SEQ ID NO: 184946 - DNA, 25 bp, Saccharomyces pastorianus
agttgcaaaaagtcgcatcattgat

SEQ ID NO: 184947 - DNA, 25 bp, Saccharomyces pastorianus
gctggtgtagacttacttgccaaca

SEQ ID NO: 184948 - DNA, 25 bp, Saccharomyces pastorianus
gtagacttacttgccaacattggta

SEQ ID NO: 184949 - DNA, 25 bp, Saccharomyces pastorianus
gatgtttcatacaaatcccaaattt

SEQ ID NO: 184950 - DNA, 25 bp, Saccharomyces pastorianus
gaagtattttcaaacggagtatcct

SEQ ID NO: 184951 - DNA, 25 bp, Saccharomyces pastorianus
gtttgctggtgtagacttacttgcc

SEQ ID NO: 184952 - DNA, 25 bp, Saccharomyces pastorianus
tcaaacggagtatcctcaaagtgga

SEQ ID NO: 184953 - DNA, 25 bp, Saccharomyces pastorianus
gctggaatgtttgctggtgtagact

SEQ ID NO: 184954 - DNA, 25 bp, Saccharomyces pastorianus
actgaaatacgtgggtccagtggac

SEQ ID NO: 184955 - DNA, 25 bp, Saccharomyces pastorianus
tcgtcgtccaaatcatccaagttgt

SEQ ID NO: 184956 - DNA, 25 bp, Saccharomyces pastorianus
gtcttgctcctttttgctttttggt

SEQ ID NO: 184957 - DNA, 25 bp, Saccharomyces pastorianus
tggcttttgcttgttgtcttgctcc

SEQ ID NO: 184958 - DNA, 25 bp, Saccharomyces pastorianus
tgttggaccttcttctaaatccttt

SEQ ID NO: 184959 - DNA, 25 bp, Saccharomyces pastorianus
tctggtttaggttcttcctcttctt

SEQ ID NO: 184960 - DNA, 25 bp, Saccharomyces pastorianus
tcgatgacaataccgccttccaaga

SEQ ID NO: 184961 - DNA, 25 bp, Saccharomyces pastorianus
atggcacggtcttcgatgacaatac

SEQ ID NO: 184962 - DNA, 25 bp, Saccharomyces pastorianus
cttcaatacgaacttcttcttcctc

SEQ ID NO: 184963 - DNA, 25 bp, Saccharomyces pastorianus
aagaccttggtctttggcttttgct

SEQ ID NO: 184964 - DNA, 25 bp, Saccharomyces pastorianus
ttttcgtcgtgctttctcttctttt

SEQ ID NO: 184965 - DNA, 25 bp, Saccharomyces pastorianus
ttagttttctttggctctggtttag

SEQ ID NO: 184966 - DNA, 25 bp, Saccharomyces pastorianus
aagcatggtatagatttgacgttca

SEQ ID NO: 184967 - DNA, 25 bp, Saccharomyces pastorianus
gaaaaaactgaatacctcctcgcaa

SEQ ID NO: 184968 - DNA, 25 bp, Saccharomyces pastorianus
aactaccagatatcgtttctataag

SEQ ID NO: 184969 - DNA, 25 bp, Saccharomyces pastorianus
tgaatacctcctcgcaaggttattt

SEQ ID NO: 184970 - DNA, 25 bp, Saccharomyces pastorianus
gatctctacaaaattccaaagctgg

SEQ ID NO: 184971 - DNA, 25 bp, Saccharomyces pastorianus
ttccaaagctggtttgaaaaaactg

SEQ ID NO: 184972 - DNA, 25 bp, Saccharomyces pastorianus
gaagcagtaaaagtcatctcagtaa

SEQ ID NO: 184973 - DNA, 25 bp, Saccharomyces pastorianus
atagatttgacgttcatgcctcgaa

SEQ ID NO: 184974 - DNA, 25 bp, Saccharomyces pastorianus
gatatcgtttctataagaagcagta

SEQ ID NO: 184975 - DNA, 25 bp, Saccharomyces pastorianus
gttcatgcctcgaagatctctacaa

SEQ ID NO: 184976 - DNA, 25 bp, Saccharomyces pastorianus
tttgacgttcatgcctcgaagatct

SEQ ID NO: 184977 - DNA, 25 bp, Saccharomyces pastorianus
aaagggagagccaccgcttgcattg

SEQ ID NO: 184978 - DNA, 25 bp, Saccharomyces pastorianus
agagccaccgcttgcattggtgaat

SEQ ID NO: 184979 - DNA, 25 bp, Saccharomyces pastorianus
aaatcttcgaaattgatgccgccaa

SEQ ID NO: 184980 - DNA, 25 bp, Saccharomyces pastorianus
ccgcttgcattggtgaatcccgaga

SEQ ID NO: 184981 - DNA, 25 bp, Saccharomyces pastorianus
gtgaatcccgagaagtcatggaact

SEQ ID NO: 184982 - DNA, 25 bp, Saccharomyces pastorianus
agaagtcatggaactgcgagccgaa

SEQ ID NO: 184983 - DNA, 25 bp, Saccharomyces pastorianus
actgcgagccgaagggagatccgcc

SEQ ID NO: 184984 - DNA, 25 bp, Saccharomyces pastorianus
ttgatgccgccaaagggagagccac

SEQ ID NO: 184985 - DNA, 25 bp, Saccharomyces pastorianus
gcattggtgaatcccgagaagtcat

SEQ ID NO: 184986 - DNA, 25 bp, Saccharomyces pastorianus
gccaaacgcagcaccgaacaaatct

SEQ ID NO: 184987 - DNA, 25 bp, Saccharomyces pastorianus
aacgcagcaccgaacaaatcttcga

SEQ ID NO: 184988 - DNA, 25 bp, Saccharomyces pastorianus
gagaattttgatgtcaaacatgaca

SEQ ID NO: 184989 - DNA, 25 bp, Saccharomyces pastorianus
aaccaggcagattgtctatggccaa

SEQ ID NO: 184990 - DNA, 25 bp, Saccharomyces pastorianus
cagattgtctatggccaatcgtggt

SEQ ID NO: 184991 - DNA, 25 bp, Saccharomyces pastorianus
gtcaaacatgacaaaccaggcagat

SEQ ID NO: 184992 - DNA, 25 bp, Saccharomyces pastorianus
aaaccaggcagattgtctatggcca

SEQ ID NO: 184993 - DNA, 25 bp, Saccharomyces pastorianus
aaacatgacaaaccaggcagattgt

SEQ ID NO: 184994 - DNA, 25 bp, Saccharomyces pastorianus
accaggcagattgtctatggccaat

SEQ ID NO: 184995 - DNA, 25 bp, Saccharomyces pastorianus
ggcagattgtctatggccaatcgtg

SEQ ID NO: 184996 - DNA, 25 bp, Saccharomyces pastorianus
acaaaccaggcagattgtctatggc

SEQ ID NO: 184997 - DNA, 25 bp, Saccharomyces pastorianus
aggcagattgtctatggccaatcgt

SEQ ID NO: 184998 - DNA, 25 bp, Saccharomyces pastorianus
ccaggcagattgtctatggccaatc

SEQ ID NO: 184999 - DNA, 25 bp, Saccharomyces pastorianus
gattacgcaaaggaagctgagctat

SEQ ID NO: 185000 - DNA, 25 bp, Saccharomyces pastorianus
gaggtccttgacagggaacccgatg

SEQ ID NO: 185001 - DNA, 25 bp, Saccharomyces pastorianus
tctcggttgttcaaggtcgtgctga

SEQ ID NO: 185002 - DNA, 25 bp, Saccharomyces pastorianus
gaacccgatgagttcaccaaatgga

SEQ ID NO: 185003 - DNA, 25 bp, Saccharomyces pastorianus
ttcaaacaatcctcactctcggttg

SEQ ID NO: 185004 - DNA, 25 bp, Saccharomyces pastorianus
ttctgcttgcataagagttttccaa

SEQ ID NO: 185005 - DNA, 25 bp, Saccharomyces pastorianus
ggctgtagcgcattaaatggccaat

SEQ ID NO: 185006 - DNA, 25 bp, Saccharomyces pastorianus
ggtcgtgctgaccatatggcattat

SEQ ID NO: 185007 - DNA, 25 bp, Saccharomyces pastorianus
gacgtatccactagcgaattccatt

SEQ ID NO: 185008 - DNA, 25 bp, Saccharomyces pastorianus
atcatgggcatttatcttttttctg

SEQ ID NO: 185009 - DNA, 25 bp, Saccharomyces pastorianus
acagtggagctgctggacgtatcca

SEQ ID NO: 185010 - DNA, 25 bp, Saccharomyces pastorianus
tatgaaacccttttccgtgcctgtt

SEQ ID NO: 185011 - DNA, 25 bp, Saccharomyces pastorianus
tgccttatgaaacccttttccgtgc

SEQ ID NO: 185012 - DNA, 25 bp, Saccharomyces pastorianus
ataggggtgccggggtgccttatga

SEQ ID NO: 185013 - DNA, 25 bp, Saccharomyces pastorianus
tataggggtgccggggtgccttatg

SEQ ID NO: 185014 - DNA, 25 bp, Saccharomyces pastorianus
gtgccttatgaaacccttttccgtg

SEQ ID NO: 185015 - DNA, 25 bp, Saccharomyces pastorianus
cttatgaaacccttttccgtgcctg

SEQ ID NO: 185016 - DNA, 25 bp, Saccharomyces pastorianus
gtgccggggtgccttatgaaaccct

SEQ ID NO: 185017 - DNA, 25 bp, Saccharomyces pastorianus
ttataggggtgccggggtgccttat

SEQ ID NO: 185018 - DNA, 25 bp, Saccharomyces pastorianus
tgccggggtgccttatgaaaccctt

SEQ ID NO: 185019 - DNA, 25 bp, Saccharomyces pastorianus
taggggtgccggggtgccttatgaa

SEQ ID NO: 185020 - DNA, 25 bp, Saccharomyces pastorianus
ttatgaaacccttttccgtgcctgt

SEQ ID NO: 185021 - DNA, 25 bp, Saccharomyces pastorianus
gatggtatttctaaatcttccatta

SEQ ID NO: 185022 - DNA, 25 bp, Saccharomyces pastorianus
aattttggaccagacgtagcgaaca

SEQ ID NO: 185023 - DNA, 25 bp, Saccharomyces pastorianus
gaatactttcttatctaacttgaag

SEQ ID NO: 185024 - DNA, 25 bp, Saccharomyces pastorianus
ggcctttctgcaccaacctaaagaa

SEQ ID NO: 185025 - DNA, 25 bp, Saccharomyces pastorianus
tgatccaagggcctttctgcaccaa

SEQ ID NO: 185026 - DNA, 25 bp, Saccharomyces pastorianus
ctggacgagagttatgacatagaat

SEQ ID NO: 185027 - DNA, 25 bp, Saccharomyces pastorianus
tgccaattttgatggtatttctaaa

SEQ ID NO: 185028 - DNA, 25 bp, Saccharomyces pastorianus
gctacttaacagacagaatactttc

SEQ ID NO: 185029 - DNA, 25 bp, Saccharomyces pastorianus
acaatggcattctggacgagagtta

SEQ ID NO: 185030 - DNA, 25 bp, Saccharomyces pastorianus
gacgtagcgaacaatggcattctgg

SEQ ID NO: 185031 - DNA, 25 bp, Saccharomyces pastorianus
atagaatctgatccaagggcctttc

SEQ ID NO: 185032 - DNA, 25 bp, Saccharomyces pastorianus
gtaaattcttcagcacacctggtgt

SEQ ID NO: 185033 - DNA, 25 bp, Saccharomyces pastorianus
gaggcattgtcgatatttactcgaa

SEQ ID NO: 185034 - DNA, 25 bp, Saccharomyces pastorianus
tgttatgattactactgacgacgat

SEQ ID NO: 185035 - DNA, 25 bp, Saccharomyces pastorianus
agggatttagcgacgatgctgtttc

SEQ ID NO: 185036 - DNA, 25 bp, Saccharomyces pastorianus
atgctgtttcgttcgattggatcca

SEQ ID NO: 185037 - DNA, 25 bp, Saccharomyces pastorianus
gaatgcactaatagcgttggaacta

SEQ ID NO: 185038 - DNA, 25 bp, Saccharomyces pastorianus
tattacctggtctacttgaaagtgg

SEQ ID NO: 185039 - DNA, 25 bp, Saccharomyces pastorianus
ataatgcttctcacatggtaccctt

SEQ ID NO: 185040 - DNA, 25 bp, Saccharomyces pastorianus
gattcgttgcatcttgattctgata

SEQ ID NO: 185041 - DNA, 25 bp, Saccharomyces pastorianus
aagccatctatccatttattacctg

SEQ ID NO: 185042 - DNA, 25 bp, Saccharomyces pastorianus
cacctggtgttattgattcgttgca

SEQ ID NO: 185043 - DNA, 25 bp, Saccharomyces pastorianus
gaacccttggcctgaactaataaat

SEQ ID NO: 185044 - DNA, 25 bp, Saccharomyces pastorianus
cttggcctgctctcaaaatgattgt

SEQ ID NO: 185045 - DNA, 25 bp, Saccharomyces pastorianus
gggagctcagctttcaacctttaac

SEQ ID NO: 185046 - DNA, 25 bp, Saccharomyces pastorianus
attccatatactgttttgctcatga

SEQ ID NO: 185047 - DNA, 25 bp, Saccharomyces pastorianus
taacgggcactctcccagatatgga

SEQ ID NO: 185048 - DNA, 25 bp, Saccharomyces pastorianus
gttatctacgaacccaattatgtgg

SEQ ID NO: 185049 - DNA, 25 bp, Saccharomyces pastorianus
ttacggttacagaacccttggcctg

SEQ ID NO: 185050 - DNA, 25 bp, Saccharomyces pastorianus
taaacgctatgcttacttggcctgc

SEQ ID NO: 185051 - DNA, 25 bp, Saccharomyces pastorianus
ggtactctcagaaacacattttgtt

SEQ ID NO: 185052 - DNA, 25 bp, Saccharomyces pastorianus
gttttgcaagcacacccagatagta

SEQ ID NO: 185053 - DNA, 25 bp, Saccharomyces pastorianus
agccacgttttctggtattccatat

SEQ ID NO: 185054 - DNA, 25 bp, Saccharomyces pastorianus
aatgtctgttattcggagcggcttc

SEQ ID NO: 185055 - DNA, 25 bp, Saccharomyces pastorianus
attcctgtgggactatgctttctgt

SEQ ID NO: 185056 - DNA, 25 bp, Saccharomyces pastorianus
gagcggcttcaatgatggcttgtat

SEQ ID NO: 185057 - DNA, 25 bp, Saccharomyces pastorianus
acatgaagaggcctgtgtctccatc

SEQ ID NO: 185058 - DNA, 25 bp, Saccharomyces pastorianus
gatccatgggtactcaaacaggctg

SEQ ID NO: 185059 - DNA, 25 bp, Saccharomyces pastorianus
atcgttggcatgttattagttccag

SEQ ID NO: 185060 - DNA, 25 bp, Saccharomyces pastorianus
taccattttcaaatcagttgggctt

SEQ ID NO: 185061 - DNA, 25 bp, Saccharomyces pastorianus
tgggctctaattatcatcgttggca

SEQ ID NO: 185062 - DNA, 25 bp, Saccharomyces pastorianus
ctatgctttctgtgggctctaatta

SEQ ID NO: 185063 - DNA, 25 bp, Saccharomyces pastorianus
aggcctgtgtctccatcgccaagat

SEQ ID NO: 185064 - DNA, 25 bp, Saccharomyces pastorianus
caccagaggatccatgggtactcaa

SEQ ID NO: 185065 - DNA, 25 bp, Saccharomyces pastorianus
aatccggataattcacaagcaacga

SEQ ID NO: 185066 - DNA, 25 bp, Saccharomyces pastorianus
atcaaccgacgtatgcacagcagga

SEQ ID NO: 185067 - DNA, 25 bp, Saccharomyces pastorianus
gcaggatatattaacgcagtcacaa

SEQ ID NO: 185068 - DNA, 25 bp, Saccharomyces pastorianus
aactttctggccacgcgctataata

SEQ ID NO: 185069 - DNA, 25 bp, Saccharomyces pastorianus
aattcaacagccaatcctatcaacc

SEQ ID NO: 185070 - DNA, 25 bp, Saccharomyces pastorianus
acaaccaccatttgtggacacaaac

SEQ ID NO: 185071 - DNA, 25 bp, Saccharomyces pastorianus
atagcgctcaaactaaattcaacag

SEQ ID NO: 185072 - DNA, 25 bp, Saccharomyces pastorianus
attaacgcagtcacaaccaccattt

SEQ ID NO: 185073 - DNA, 25 bp, Saccharomyces pastorianus
gaaaggtcaaaatagcgctcaaact

SEQ ID NO: 185074 - DNA, 25 bp, Saccharomyces pastorianus
agccaatcctatcaaccgacgtatg

SEQ ID NO: 185075 - DNA, 25 bp, Saccharomyces pastorianus
tctggccacgcgctataatatagga

SEQ ID NO: 185076 - DNA, 25 bp, Saccharomyces pastorianus
aattcattcacttgggagatcaccg

SEQ ID NO: 185077 - DNA, 25 bp, Saccharomyces pastorianus
attcacttgggagatcaccgttgtt

SEQ ID NO: 185078 - DNA, 25 bp, Saccharomyces pastorianus
gactcaataaacaccttttgtgctc

SEQ ID NO: 185079 - DNA, 25 bp, Saccharomyces pastorianus
attcattcacttgggagatcaccgt

SEQ ID NO: 185080 - DNA, 25 bp, Saccharomyces pastorianus
tcattcacttgggagatcaccgttg

SEQ ID NO: 185081 - DNA, 25 bp, Saccharomyces pastorianus
aataaacaccttttgtgctcctcca

SEQ ID NO: 185082 - DNA, 25 bp, Saccharomyces pastorianus
ccagactcaataaacaccttttgtg

SEQ ID NO: 185083 - DNA, 25 bp, Saccharomyces pastorianus
acttgggagatcaccgttgttggag

SEQ ID NO: 185084 - DNA, 25 bp, Saccharomyces pastorianus
taaacaccttttgtgctcctccaga

SEQ ID NO: 185085 - DNA, 25 bp, Saccharomyces pastorianus
aacaccttttgtgctcctccagaat

SEQ ID NO: 185086 - DNA, 25 bp, Saccharomyces pastorianus
tcacttgggagatcaccgttgttgg

SEQ ID NO: 185087 - DNA, 25 bp, Saccharomyces pastorianus
tctcctcccttatatgttccattac

SEQ ID NO: 185088 - DNA, 25 bp, Saccharomyces pastorianus
cccttatatgttccattaccctatt

SEQ ID NO: 185089 - DNA, 25 bp, Saccharomyces pastorianus
atcatttctcctcccttatatgttc

SEQ ID NO: 185090 - DNA, 25 bp, Saccharomyces pastorianus
atttctcctcccttatatgttccat

SEQ ID NO: 185091 - DNA, 25 bp, Saccharomyces pastorianus
cttatatgttccattaccctattac

SEQ ID NO: 185092 - DNA, 25 bp, Saccharomyces pastorianus
ttctcctcccttatatgttccatta

SEQ ID NO: 185093 - DNA, 25 bp, Saccharomyces pastorianus
catcatttctcctcccttatatgtt

SEQ ID NO: 185094 - DNA, 25 bp, Saccharomyces pastorianus
atttctgcatattaatatcaccatc

SEQ ID NO: 185095 - DNA, 25 bp, Saccharomyces pastorianus
accctattacattataaatcctcgt

SEQ ID NO: 185096 - DNA, 25 bp, Saccharomyces pastorianus
ttaatatcaccatcatttctcctcc

SEQ ID NO: 185097 - DNA, 25 bp, Saccharomyces pastorianus
tcccttatatgttccattaccctat

SEQ ID NO: 185098 - DNA, 25 bp, Saccharomyces pastorianus
gagcttctactccaattttaactaa

SEQ ID NO: 185099 - DNA, 25 bp, Saccharomyces pastorianus
atgatgccttcaactccttatattc

SEQ ID NO: 185100 - DNA, 25 bp, Saccharomyces pastorianus
ttagcgttgccattcgtgacagatt

SEQ ID NO: 185101 - DNA, 25 bp, Saccharomyces pastorianus
gatttcattacttctaacacctctg

SEQ ID NO: 185102 - DNA, 25 bp, Saccharomyces pastorianus
aaaatctcgtacagctccagtagca

SEQ ID NO: 185103 - DNA, 25 bp, Saccharomyces pastorianus
gtattcagtgccttcatcaatgttt

SEQ ID NO: 185104 - DNA, 25 bp, Saccharomyces pastorianus
agtcctttttgccttagtattcagt

SEQ ID NO: 185105 - DNA, 25 bp, Saccharomyces pastorianus
ggcaagttcttcagtatcctcattt

SEQ ID NO: 185106 - DNA, 25 bp, Saccharomyces pastorianus
ggattcataccagttacaccgcaga

SEQ ID NO: 185107 - DNA, 25 bp, Saccharomyces pastorianus
acaactttggcgctaattgggtcaa

SEQ ID NO: 185108 - DNA, 25 bp, Saccharomyces pastorianus
aagctattgttaccgtcacaccatt

SEQ ID NO: 185109 - DNA, 25 bp, Saccharomyces pastorianus
taatattacgattatccctcattcc

SEQ ID NO: 185110 - DNA, 25 bp, Saccharomyces pastorianus
tatactaatattacgattatccctc

SEQ ID NO: 185111 - DNA, 25 bp, Saccharomyces pastorianus
tactaatattacgattatccctcat

SEQ ID NO: 185112 - DNA, 25 bp, Saccharomyces pastorianus
aatattacgattatccctcattccg

SEQ ID NO: 185113 - DNA, 25 bp, Saccharomyces pastorianus
actaatattacgattatccctcatt

SEQ ID NO: 185114 - DNA, 25 bp, Saccharomyces pastorianus
atactaatattacgattatccctca

SEQ ID NO: 185115 - DNA, 25 bp, Saccharomyces pastorianus
ttttatatgtttcattatcctatta

SEQ ID NO: 185116 - DNA, 25 bp, Saccharomyces pastorianus
ctaatattacgattatccctcattc

SEQ ID NO: 185117 - DNA, 25 bp, Saccharomyces pastorianus
gaatcaatatttctatatactaata

SEQ ID NO: 185118 - DNA, 25 bp, Saccharomyces pastorianus
atattacgattatccctcattccgt

SEQ ID NO: 185119 - DNA, 25 bp, Saccharomyces pastorianus
cattatcaatcctttcacttcagct

SEQ ID NO: 185120 - DNA, 25 bp, Saccharomyces pastorianus
gaatatactggatcgcgtcagcaac

SEQ ID NO: 185121 - DNA, 25 bp, Saccharomyces pastorianus
agatcggcgagtgaatcgtcgacga

SEQ ID NO: 185122 - DNA, 25 bp, Saccharomyces pastorianus
gcaggcagaaaccacagcgaccaga

SEQ ID NO: 185123 - DNA, 25 bp, Saccharomyces pastorianus
atcatgcaggcagaaaccacagcga

SEQ ID NO: 185124 - DNA, 25 bp, Saccharomyces pastorianus
tcggcgagtgaatcgtcgacgacgc

SEQ ID NO: 185125 - DNA, 25 bp, Saccharomyces pastorianus
agcggctgaagtactaggagtactg

SEQ ID NO: 185126 - DNA, 25 bp, Saccharomyces pastorianus
acagcgaccagaggacgtctcgcga

SEQ ID NO: 185127 - DNA, 25 bp, Saccharomyces pastorianus
ctaggagtactgaaacaatcatgca

SEQ ID NO: 185128 - DNA, 25 bp, Saccharomyces pastorianus
aaaccacagcgaccagaggacgtct

SEQ ID NO: 185129 - DNA, 25 bp, Saccharomyces pastorianus
gtcgacgacgcctctgaatatactg

SEQ ID NO: 185130 - DNA, 25 bp, Saccharomyces pastorianus
gacgcctctgaatatactggatcgc

SEQ ID NO: 185131 - DNA, 25 bp, Saccharomyces pastorianus
gtttctgcctacgagaggattgcta

SEQ ID NO: 185132 - DNA, 25 bp, Saccharomyces pastorianus
gacgattcatcatcttcctctgtat

SEQ ID NO: 185133 - DNA, 25 bp, Saccharomyces pastorianus
ctgtatccagcacgacacatagtac

SEQ ID NO: 185134 - DNA, 25 bp, Saccharomyces pastorianus
gtcagccaagtgtacaggctcccaa

SEQ ID NO: 185135 - DNA, 25 bp, Saccharomyces pastorianus
agtgtacaggctcccaacaagaatg

SEQ ID NO: 185136 - DNA, 25 bp, Saccharomyces pastorianus
acgacacatagtacgtcagccaagt

SEQ ID NO: 185137 - DNA, 25 bp, Saccharomyces pastorianus
agaatgtcaactgcctacaaatacc

SEQ ID NO: 185138 - DNA, 25 bp, Saccharomyces pastorianus
aatgtttctgatactgtttctgcct

SEQ ID NO: 185139 - DNA, 25 bp, Saccharomyces pastorianus
gatactgtttctgcctacgagagga

SEQ ID NO: 185140 - DNA, 25 bp, Saccharomyces pastorianus
attcatcatcttcctctgtatccag

SEQ ID NO: 185141 - DNA, 25 bp, Saccharomyces pastorianus
caaccctcgtaacttcagcagtaaa

SEQ ID NO: 185142 - DNA, 25 bp, Saccharomyces pastorianus
taccaagtagtacacttacttcctt

SEQ ID NO: 185143 - DNA, 25 bp, Saccharomyces pastorianus
tcagccattgtttccgcttgggggt

SEQ ID NO: 185144 - DNA, 25 bp, Saccharomyces pastorianus
gcacaatgataccaagtagtacact

SEQ ID NO: 185145 - DNA, 25 bp, Saccharomyces pastorianus
gacgcacaatgataccaagtagtac

SEQ ID NO: 185146 - DNA, 25 bp, Saccharomyces pastorianus
taaacaaggccgatttatattggtt

SEQ ID NO: 185147 - DNA, 25 bp, Saccharomyces pastorianus
aagcgacaacaatgatggtagcacc

SEQ ID NO: 185148 - DNA, 25 bp, Saccharomyces pastorianus
gacaacaatgatggtagcaccgcta

SEQ ID NO: 185149 - DNA, 25 bp, Saccharomyces pastorianus
caacaatgatggtagcaccgctaag

SEQ ID NO: 185150 - DNA, 25 bp, Saccharomyces pastorianus
gccgatttatattggtttatagcat

SEQ ID NO: 185151 - DNA, 25 bp, Saccharomyces pastorianus
gataccaagtagtacacttacttcc

SEQ ID NO: 185152 - DNA, 25 bp, Saccharomyces pastorianus
caaggccgatttatattggtttata

SEQ ID NO: 185153 - DNA, 25 bp, Saccharomyces pastorianus
aacaactcttgcgtgcatggtgcga

SEQ ID NO: 185154 - DNA, 25 bp, Saccharomyces pastorianus
gagtcaagagacaccccgaatttag

SEQ ID NO: 185155 - DNA, 25 bp, Saccharomyces pastorianus
atgcactctgccgatcttttgagga

SEQ ID NO: 185156 - DNA, 25 bp, Saccharomyces pastorianus
aactgtggctacaaggcgacgagac

SEQ ID NO: 185157 - DNA, 25 bp, Saccharomyces pastorianus
ccacttctgtcctggaaactttcag

SEQ ID NO: 185158 - DNA, 25 bp, Saccharomyces pastorianus
aaagtaaaagatcggcgcacctcca

SEQ ID NO: 185159 - DNA, 25 bp, Saccharomyces pastorianus
cagatcccgcagttgtttctgggaa

SEQ ID NO: 185160 - DNA, 25 bp, Saccharomyces pastorianus
gagtcgttcacgtcaagcacagatg

SEQ ID NO: 185161 - DNA, 25 bp, Saccharomyces pastorianus
gttttaagcattttcccacttctgt

SEQ ID NO: 185162 - DNA, 25 bp, Saccharomyces pastorianus
atcgtattcgaatgccagatcccgc

SEQ ID NO: 185163 - DNA, 25 bp, Saccharomyces pastorianus
tcatcgacaatatcagggccgcctg

SEQ ID NO: 185164 - DNA, 25 bp, Saccharomyces pastorianus
gaatctaacttcaagcgacgcaaag

SEQ ID NO: 185165 - DNA, 25 bp, Saccharomyces pastorianus
aagtagtcagatctgtcggcgccaa

SEQ ID NO: 185166 - DNA, 25 bp, Saccharomyces pastorianus
actggcatcgccaagagattaaata

SEQ ID NO: 185167 - DNA, 25 bp, Saccharomyces pastorianus
gatatctgcaacatctttaccaaag

SEQ ID NO: 185168 - DNA, 25 bp, Saccharomyces pastorianus
ccgtataccggcgaaatgaatgcta

SEQ ID NO: 185169 - DNA, 25 bp, Saccharomyces pastorianus
gacgcaaagaccttttttgcatggt

SEQ ID NO: 185170 - DNA, 25 bp, Saccharomyces pastorianus
gggttacagtgatatctgcaacatc

SEQ ID NO: 185171 - DNA, 25 bp, Saccharomyces pastorianus
acttattatcaaacaggacctggcc

SEQ ID NO: 185172 - DNA, 25 bp, Saccharomyces pastorianus
acaaaatatttgactggcatcgcca

SEQ ID NO: 185173 - DNA, 25 bp, Saccharomyces pastorianus
acaggacctggccatgaagtagtca

SEQ ID NO: 185174 - DNA, 25 bp, Saccharomyces pastorianus
ggcgccaatactttgagtgctcatc

SEQ ID NO: 185175 - DNA, 25 bp, Saccharomyces pastorianus
atcgcatcgcgctataacttgggac

SEQ ID NO: 185176 - DNA, 25 bp, Saccharomyces pastorianus
ttatgtgcctccttgccataaaaaa

SEQ ID NO: 185177 - DNA, 25 bp, Saccharomyces pastorianus
ggatgaacagcctgaagatttcaaa

SEQ ID NO: 185178 - DNA, 25 bp, Saccharomyces pastorianus
agaaacaagacagaaacgcccttct

SEQ ID NO: 185179 - DNA, 25 bp, Saccharomyces pastorianus
tgggaccctagtatacaaataccgt

SEQ ID NO: 185180 - DNA, 25 bp, Saccharomyces pastorianus
cgcgctataacttgggaccctagta

SEQ ID NO: 185181 - DNA, 25 bp, Saccharomyces pastorianus
agaaacgcccttctgtgacttgctt

SEQ ID NO: 185182 - DNA, 25 bp, Saccharomyces pastorianus
agtatacaaataccgtttgcaacat

SEQ ID NO: 185183 - DNA, 25 bp, Saccharomyces pastorianus
tgtgacttgcttccatcgcatcgcg

SEQ ID NO: 185184 - DNA, 25 bp, Saccharomyces pastorianus
acatgtctggaaggttcgtaaaaat

SEQ ID NO: 185185 - DNA, 25 bp, Saccharomyces pastorianus
atatttatgtgcctccttgccataa

SEQ ID NO: 185186 - DNA, 25 bp, Saccharomyces pastorianus
gtaatagtggcgctactccaagtcc

SEQ ID NO: 185187 - DNA, 25 bp, Saccharomyces pastorianus
acccatcaaagtcgtaaggcttcct

SEQ ID NO: 185188 - DNA, 25 bp, Saccharomyces pastorianus
gataactatcttacaccatccaaag

SEQ ID NO: 185189 - DNA, 25 bp, Saccharomyces pastorianus
ataccagctggttcgaatcctttga

SEQ ID NO: 185190 - DNA, 25 bp, Saccharomyces pastorianus
gaatgcatttttacccatcgatttc

SEQ ID NO: 185191 - DNA, 25 bp, Saccharomyces pastorianus
agccaattttggttccgtggagtat

SEQ ID NO: 185192 - DNA, 25 bp, Saccharomyces pastorianus
agccaatatcgcaatcttatccaga

SEQ ID NO: 185193 - DNA, 25 bp, Saccharomyces pastorianus
taacggtcctaaactgcctcatata

SEQ ID NO: 185194 - DNA, 25 bp, Saccharomyces pastorianus
aaggcttccttctgatggatccgta

SEQ ID NO: 185195 - DNA, 25 bp, Saccharomyces pastorianus
ttccatttcgctcctctagataaag

SEQ ID NO: 185196 - DNA, 25 bp, Saccharomyces pastorianus
gaggtttggcgcattcaaatcaact

SEQ ID NO: 185197 - DNA, 25 bp, Saccharomyces pastorianus
tattgtagacgacctaccctggtac

SEQ ID NO: 185198 - DNA, 25 bp, Saccharomyces pastorianus
attactacagacacggcttcttcaa

SEQ ID NO: 185199 - DNA, 25 bp, Saccharomyces pastorianus
tgggcagacattacgcctcaatcca

SEQ ID NO: 185200 - DNA, 25 bp, Saccharomyces pastorianus
ggctatttgcttcggtgccattaat

SEQ ID NO: 185201 - DNA, 25 bp, Saccharomyces pastorianus
aactatatggctggccttggctgtt

SEQ ID NO: 185202 - DNA, 25 bp, Saccharomyces pastorianus
gctaggcctttaccacagcgaagaa

SEQ ID NO: 185203 - DNA, 25 bp, Saccharomyces pastorianus
aaatctcgctattttaagcacgtgg

SEQ ID NO: 185204 - DNA, 25 bp, Saccharomyces pastorianus
aagttttgccttccgaggacaatgc

SEQ ID NO: 185205 - DNA, 25 bp, Saccharomyces pastorianus
agagtgcctgtttcgagtggctgtt

SEQ ID NO: 185206 - DNA, 25 bp, Saccharomyces pastorianus
cttggctgttgtttgggctatttgc

SEQ ID NO: 185207 - DNA, 25 bp, Saccharomyces pastorianus
caaatttacaatcagtgccacccta

SEQ ID NO: 185208 - DNA, 25 bp, Saccharomyces pastorianus
gattggtgaacatctctggtttccc

SEQ ID NO: 185209 - DNA, 25 bp, Saccharomyces pastorianus
gattattggtgcctaccaaggccaa

SEQ ID NO: 185210 - DNA, 25 bp, Saccharomyces pastorianus
gaatatggtgcacccagttcacatt

SEQ ID NO: 185211 - DNA, 25 bp, Saccharomyces pastorianus
tggtatggccaacaaagcttctttt

SEQ ID NO: 185212 - DNA, 25 bp, Saccharomyces pastorianus
agttcacattctgctaacgctactg

SEQ ID NO: 185213 - DNA, 25 bp, Saccharomyces pastorianus
gtgatattttactacttaaccctgg

SEQ ID NO: 185214 - DNA, 25 bp, Saccharomyces pastorianus
aacgctactgcggtaagtctattat

SEQ ID NO: 185215 - DNA, 25 bp, Saccharomyces pastorianus
atgatctacgttcttggttattcaa

SEQ ID NO: 185216 - DNA, 25 bp, Saccharomyces pastorianus
aaggccaaaatcaccgccagttgac

SEQ ID NO: 185217 - DNA, 25 bp, Saccharomyces pastorianus
agcttcttttactgagtctggtgat

SEQ ID NO: 185218 - DNA, 25 bp, Saccharomyces pastorianus
gtttatctgacacactggtatggcc

SEQ ID NO: 185219 - DNA, 25 bp, Saccharomyces pastorianus
catactaatattacgaatattcctc

SEQ ID NO: 185220 - DNA, 25 bp, Saccharomyces pastorianus
taatattacgaatattcctcattcc

SEQ ID NO: 185221 - DNA, 25 bp, Saccharomyces pastorianus
tactaatattacgaatattcctcat

SEQ ID NO: 185222 - DNA, 25 bp, Saccharomyces pastorianus
aatattacgaatattcctcattccg

SEQ ID NO: 185223 - DNA, 25 bp, Saccharomyces pastorianus
actaatattacgaatattcctcatt

SEQ ID NO: 185224 - DNA, 25 bp, Saccharomyces pastorianus
atactaatattacgaatattcctca

SEQ ID NO: 185225 - DNA, 25 bp, Saccharomyces pastorianus
tggaatctatatttctacatactaa

SEQ ID NO: 185226 - DNA, 25 bp, Saccharomyces pastorianus
atggaatctatatttctacatacta

SEQ ID NO: 185227 - DNA, 25 bp, Saccharomyces pastorianus
ctaatattacgaatattcctcattc

SEQ ID NO: 185228 - DNA, 25 bp, Saccharomyces pastorianus
acatactaatattacgaatattcct

SEQ ID NO: 185229 - DNA, 25 bp, Saccharomyces pastorianus
ggaatctatatttctacatactaat

SEQ ID NO: 185230 - DNA, 25 bp, Saccharomyces pastorianus
gaggttttccagaatgatcaacgat

SEQ ID NO: 185231 - DNA, 25 bp, Saccharomyces pastorianus
taagtgacacctttttcatttggaa

SEQ ID NO: 185232 - DNA, 25 bp, Saccharomyces pastorianus
gaaatctgatggtcgttggcaatta

SEQ ID NO: 185233 - DNA, 25 bp, Saccharomyces pastorianus
tttttctccggtaaattcgctgtct

SEQ ID NO: 185234 - DNA, 25 bp, Saccharomyces pastorianus
tattccccatttctacattctcgaa

SEQ ID NO: 185235 - DNA, 25 bp, Saccharomyces pastorianus
taagttgtctgccttgttgtacgtg

SEQ ID NO: 185236 - DNA, 25 bp, Saccharomyces pastorianus
cgtggataacgacgctaacgtggtt

SEQ ID NO: 185237 - DNA, 25 bp, Saccharomyces pastorianus
cgtggttaagaacacttcctggaag

SEQ ID NO: 185238 - DNA, 25 bp, Saccharomyces pastorianus
tgataaacgggcctggttacaaaat

SEQ ID NO: 185239 - DNA, 25 bp, Saccharomyces pastorianus
gtctccttcatctttgagtaccgat

SEQ ID NO: 185240 - DNA, 25 bp, Saccharomyces pastorianus
aacaatgagccttccgcatctctgg

SEQ ID NO: 185241 - DNA, 25 bp, Saccharomyces pastorianus
attccagtacttatcgttccctcaa

SEQ ID NO: 185242 - DNA, 25 bp, Saccharomyces pastorianus
tcgaccgaaaactcagtgatatctt

SEQ ID NO: 185243 - DNA, 25 bp, Saccharomyces pastorianus
atacttgggttgctctagattggac

SEQ ID NO: 185244 - DNA, 25 bp, Saccharomyces pastorianus
gtacattttacagcttctgaaggca

SEQ ID NO: 185245 - DNA, 25 bp, Saccharomyces pastorianus
gctgtaagctttcctattccagtac

SEQ ID NO: 185246 - DNA, 25 bp, Saccharomyces pastorianus
gcaattaacgtttatacaccggact

SEQ ID NO: 185247 - DNA, 25 bp, Saccharomyces pastorianus
aactggctgatgtttttgctgtaag

SEQ ID NO: 185248 - DNA, 25 bp, Saccharomyces pastorianus
gttttaactacactaccaagattga

SEQ ID NO: 185249 - DNA, 25 bp, Saccharomyces pastorianus
agattggaccctttgcaagattgca

SEQ ID NO: 185250 - DNA, 25 bp, Saccharomyces pastorianus
aaatagtagctatatcttccgagat

SEQ ID NO: 185251 - DNA, 25 bp, Saccharomyces pastorianus
acaccggacttcctagttatcgcta

SEQ ID NO: 185252 - DNA, 25 bp, Saccharomyces pastorianus
tgtgactactttagttgacccaact

SEQ ID NO: 185253 - DNA, 25 bp, Saccharomyces pastorianus
gcgctgtgactactttagttgaccc

SEQ ID NO: 185254 - DNA, 25 bp, Saccharomyces pastorianus
tacttctgtagtcatttcaacctca

SEQ ID NO: 185255 - DNA, 25 bp, Saccharomyces pastorianus
ctgtagtcatttcaacctcagttga

SEQ ID NO: 185256 - DNA, 25 bp, Saccharomyces pastorianus
gtgactactttagttgacccaacta

SEQ ID NO: 185257 - DNA, 25 bp, Saccharomyces pastorianus
ttctgtagtcatttcaacctcagtt

SEQ ID NO: 185258 - DNA, 25 bp, Saccharomyces pastorianus
tgactactttagttgacccaactac

SEQ ID NO: 185259 - DNA, 25 bp, Saccharomyces pastorianus
gtagtcatttcaacctcagttgatc

SEQ ID NO: 185260 - DNA, 25 bp, Saccharomyces pastorianus
catttcaacctcagttgatcaaact

SEQ ID NO: 185261 - DNA, 25 bp, Saccharomyces pastorianus
gtcatttcaacctcagttgatcaaa

SEQ ID NO: 185262 - DNA, 25 bp, Saccharomyces pastorianus
gctgtgactactttagttgacccaa

SEQ ID NO: 185263 - DNA, 25 bp, Saccharomyces pastorianus
aagcctccgccaagcgatgctatcg

SEQ ID NO: 185264 - DNA, 25 bp, Saccharomyces pastorianus
tgctatcgggaatctactttaatgt

SEQ ID NO: 185265 - DNA, 25 bp, Saccharomyces pastorianus
gaatctactttaatgtgaacccgga

SEQ ID NO: 185266 - DNA, 25 bp, Saccharomyces pastorianus
aaggtactaccaagcctccgccaag

SEQ ID NO: 185267 - DNA, 25 bp, Saccharomyces pastorianus
caagcgatgctatcgggaatctact

SEQ ID NO: 185268 - DNA, 25 bp, Saccharomyces pastorianus
atcgggaatctactttaatgtgaac

SEQ ID NO: 185269 - DNA, 25 bp, Saccharomyces pastorianus
gccaagcgatgctatcgggaatcta

SEQ ID NO: 185270 - DNA, 25 bp, Saccharomyces pastorianus
cgatgctatcgggaatctactttaa

SEQ ID NO: 185271 - DNA, 25 bp, Saccharomyces pastorianus
taatcaaggtactaccaagcctccg

SEQ ID NO: 185272 - DNA, 25 bp, Saccharomyces pastorianus
aactatctaatcaaggtactaccaa

SEQ ID NO: 185273 - DNA, 25 bp, Saccharomyces pastorianus
tccgccaagcgatgctatcgggaat

SEQ ID NO: 185274 - DNA, 25 bp, Saccharomyces pastorianus
cagctactggagaattggacaacca

SEQ ID NO: 185275 - DNA, 25 bp, Saccharomyces pastorianus
actgctttcgtataacaagactttt

SEQ ID NO: 185276 - DNA, 25 bp, Saccharomyces pastorianus
gaagcgatccaagatttattccagc

SEQ ID NO: 185277 - DNA, 25 bp, Saccharomyces pastorianus
ccaagatttattccagctactggag

SEQ ID NO: 185278 - DNA, 25 bp, Saccharomyces pastorianus
gatccaagatttattccagctactg

SEQ ID NO: 185279 - DNA, 25 bp, Saccharomyces pastorianus
aagtagtcgaagaagcgatccaaga

SEQ ID NO: 185280 - DNA, 25 bp, Saccharomyces pastorianus
tggacaaccaaataccacacgtatg

SEQ ID NO: 185281 - DNA, 25 bp, Saccharomyces pastorianus
gaaaaatgtagtatccagatggcta

SEQ ID NO: 185282 - DNA, 25 bp, Saccharomyces pastorianus
ataccacacgtatgaaaaatgtagt

SEQ ID NO: 185283 - DNA, 25 bp, Saccharomyces pastorianus
tagtatccagatggctacaacagcc

SEQ ID NO: 185284 - DNA, 25 bp, Saccharomyces pastorianus
caagacttttattacagattcagaa

SEQ ID NO: 185285 - DNA, 25 bp, Saccharomyces pastorianus
cgttaagtacctttccaacagctgg

SEQ ID NO: 185286 - DNA, 25 bp, Saccharomyces pastorianus
atgaacgtgcagctgcttctgtaaa

SEQ ID NO: 185287 - DNA, 25 bp, Saccharomyces pastorianus
attggtggtgtttcctatgactttc

SEQ ID NO: 185288 - DNA, 25 bp, Saccharomyces pastorianus
ctgatacgaagagtccagcgccatc

SEQ ID NO: 185289 - DNA, 25 bp, Saccharomyces pastorianus
aaacagcaacatttctccatcaacg

SEQ ID NO: 185290 - DNA, 25 bp, Saccharomyces pastorianus
atgatggtcagctctctgatacgaa

SEQ ID NO: 185291 - DNA, 25 bp, Saccharomyces pastorianus
tagtattatggaacctcaggcggct

SEQ ID NO: 185292 - DNA, 25 bp, Saccharomyces pastorianus
cgaagttctgtttctgctggtacca

SEQ ID NO: 185293 - DNA, 25 bp, Saccharomyces pastorianus
aacgccctctgcagtgttgaatgat

SEQ ID NO: 185294 - DNA, 25 bp, Saccharomyces pastorianus
caggcggctgatgcggtttcgacaa

SEQ ID NO: 185295 - DNA, 25 bp, Saccharomyces pastorianus
ggtttcgacaatggcgcctatatca

SEQ ID NO: 185296 - DNA, 25 bp, Saccharomyces pastorianus
tctagcgggatcgaaccgctgatcc

SEQ ID NO: 185297 - DNA, 25 bp, Saccharomyces pastorianus
aaccaactgggccaagagaccatta

SEQ ID NO: 185298 - DNA, 25 bp, Saccharomyces pastorianus
atggtctctagcgggatcgaaccgc

SEQ ID NO: 185299 - DNA, 25 bp, Saccharomyces pastorianus
cgaaccgctgatccccgcgttatta

SEQ ID NO: 185300 - DNA, 25 bp, Saccharomyces pastorianus
gtctctagcgggatcgaaccgctga

SEQ ID NO: 185301 - DNA, 25 bp, Saccharomyces pastorianus
tctctagcgggatcgaaccgctgat

SEQ ID NO: 185302 - DNA, 25 bp, Saccharomyces pastorianus
ctctagcgggatcgaaccgctgatc

SEQ ID NO: 185303 - DNA, 25 bp, Saccharomyces pastorianus
ggtctctagcgggatcgaaccgctg

SEQ ID NO: 185304 - DNA, 25 bp, Saccharomyces pastorianus
ggatcgaaccgctgatccccgcgtt

SEQ ID NO: 185305 - DNA, 25 bp, Saccharomyces pastorianus
tagcgggatcgaaccgctgatcccc

SEQ ID NO: 185306 - DNA, 25 bp, Saccharomyces pastorianus
gctgatccccgcgttattagcacgg

SEQ ID NO: 185307 - DNA, 25 bp, Saccharomyces pastorianus
tatttcatcgcgtgattgaggagca

SEQ ID NO: 185308 - DNA, 25 bp, Saccharomyces pastorianus
aaaataggcctttatttcatcgcgt

SEQ ID NO: 185309 - DNA, 25 bp, Saccharomyces pastorianus
ggcctttatttcatcgcgtgattga

SEQ ID NO: 185310 - DNA, 25 bp, Saccharomyces pastorianus
catcgcgtgattgaggagcataaca

SEQ ID NO: 185311 - DNA, 25 bp, Saccharomyces pastorianus
ggaaattttcaaaggcgttggatca

SEQ ID NO: 185312 - DNA, 25 bp, Saccharomyces pastorianus
taggcctttatttcatcgcgtgatt

SEQ ID NO: 185313 - DNA, 25 bp, Saccharomyces pastorianus
aataggcctttatttcatcgcgtga

SEQ ID NO: 185314 - DNA, 25 bp, Saccharomyces pastorianus
cgtgattgaggagcataacatgttt

SEQ ID NO: 185315 - DNA, 25 bp, Saccharomyces pastorianus
atgttcatggtaggtaccccaccca

SEQ ID NO: 185316 - DNA, 25 bp, Saccharomyces pastorianus
ccacccagccataaggaaattttca

SEQ ID NO: 185317 - DNA, 25 bp, Saccharomyces pastorianus
gtaggtaccccacccagccataagg

SEQ ID NO: 185318 - DNA, 25 bp, Saccharomyces pastorianus
ttgacgagtacgattctttctttta

SEQ ID NO: 185319 - DNA, 25 bp, Saccharomyces pastorianus
ggaattgacgagtacgattctttct

SEQ ID NO: 185320 - DNA, 25 bp, Saccharomyces pastorianus
tgacgagtacgattctttcttttaa

SEQ ID NO: 185321 - DNA, 25 bp, Saccharomyces pastorianus
aattgacgagtacgattctttcttt

SEQ ID NO: 185322 - DNA, 25 bp, Saccharomyces pastorianus
actgcttccatgtgccagcctcatt

SEQ ID NO: 185323 - DNA, 25 bp, Saccharomyces pastorianus
tgaacaactgcttccatgtgccagc

SEQ ID NO: 185324 - DNA, 25 bp, Saccharomyces pastorianus
aggaattgacgagtacgattctttc

SEQ ID NO: 185325 - DNA, 25 bp, Saccharomyces pastorianus
attgacgagtacgattctttctttt

SEQ ID NO: 185326 - DNA, 25 bp, Saccharomyces pastorianus
gttgaacaactgcttccatgtgcca

SEQ ID NO: 185327 - DNA, 25 bp, Saccharomyces pastorianus
gaattgacgagtacgattctttctt

SEQ ID NO: 185328 - DNA, 25 bp, Saccharomyces pastorianus
gattctttcttttaaatatcgtgaa

SEQ ID NO: 185329 - DNA, 25 bp, Saccharomyces pastorianus
aatattttgccaagaatggtaaaag

SEQ ID NO: 185330 - DNA, 25 bp, Saccharomyces pastorianus
gaatattttgccaagaatggtaaaa

SEQ ID NO: 185331 - DNA, 25 bp, Saccharomyces pastorianus
gaagaaagaatattttgccaagaat

SEQ ID NO: 185332 - DNA, 25 bp, Saccharomyces pastorianus
ggtaaaagaacaaccatggatggtg

SEQ ID NO: 185333 - DNA, 25 bp, Saccharomyces pastorianus
aagaagaaagaatattttgccaaga

SEQ ID NO: 185334 - DNA, 25 bp, Saccharomyces pastorianus
agaatattttgccaagaatggtaaa

SEQ ID NO: 185335 - DNA, 25 bp, Saccharomyces pastorianus
aaagaagaaagaatattttgccaag

SEQ ID NO: 185336 - DNA, 25 bp, Saccharomyces pastorianus
gaaagaatattttgccaagaatggt

SEQ ID NO: 185337 - DNA, 25 bp, Saccharomyces pastorianus
taaaagaacaaccatggatggtgac

SEQ ID NO: 185338 - DNA, 25 bp, Saccharomyces pastorianus
aaagaatattttgccaagaatggta

SEQ ID NO: 185339 - DNA, 25 bp, Saccharomyces pastorianus
tattttgccaagaatggtaaaagaa

SEQ ID NO: 185340 - DNA, 25 bp, Saccharomyces pastorianus
tttgatctttgagtcaccacaattg

SEQ ID NO: 185341 - DNA, 25 bp, Saccharomyces pastorianus
ctgcatagaagaggtacggccacac

SEQ ID NO: 185342 - DNA, 25 bp, Saccharomyces pastorianus
ggccacacaaggtactttacatttg

SEQ ID NO: 185343 - DNA, 25 bp, Saccharomyces pastorianus
tttacatttgactactcaccatttg

SEQ ID NO: 185344 - DNA, 25 bp, Saccharomyces pastorianus
ttgagtcaccacaattgtcgacgga

SEQ ID NO: 185345 - DNA, 25 bp, Saccharomyces pastorianus
gatctttgagtcaccacaattgtcg

SEQ ID NO: 185346 - DNA, 25 bp, Saccharomyces pastorianus
ggtactttacatttgactactcacc

SEQ ID NO: 185347 - DNA, 25 bp, Saccharomyces pastorianus
gaggtacggccacacaaggtacttt

SEQ ID NO: 185348 - DNA, 25 bp, Saccharomyces pastorianus
agtcaccacaattgtcgacggaatt

SEQ ID NO: 185349 - DNA, 25 bp, Saccharomyces pastorianus
tacggccacacaaggtactttacat

SEQ ID NO: 185350 - DNA, 25 bp, Saccharomyces pastorianus
acatttgactactcaccatttgatc

SEQ ID NO: 185351 - DNA, 25 bp, Saccharomyces pastorianus
taaggctaccatctgcaagcgacaa

SEQ ID NO: 185352 - DNA, 25 bp, Saccharomyces pastorianus
tccacagccgctgagattgcgaata

SEQ ID NO: 185353 - DNA, 25 bp, Saccharomyces pastorianus
gagttcatggagatcaactaccttt

SEQ ID NO: 185354 - DNA, 25 bp, Saccharomyces pastorianus
gtttacgagtcctcctttgatgtat

SEQ ID NO: 185355 - DNA, 25 bp, Saccharomyces pastorianus
ggtaccaatcgtgtcttggaattgc

SEQ ID NO: 185356 - DNA, 25 bp, Saccharomyces pastorianus
atggctactgtcttacaagtttacg

SEQ ID NO: 185357 - DNA, 25 bp, Saccharomyces pastorianus
gcccggcgtagatagtgcaactttt

SEQ ID NO: 185358 - DNA, 25 bp, Saccharomyces pastorianus
gaacaaattcagatccacagccgct

SEQ ID NO: 185359 - DNA, 25 bp, Saccharomyces pastorianus
ggaactcagcgatttgcatctaaca

SEQ ID NO: 185360 - DNA, 25 bp, Saccharomyces pastorianus
gaaccattgatcagcgatccattga

SEQ ID NO: 185361 - DNA, 25 bp, Saccharomyces pastorianus
ttggaattgcattggcagcccggcg

SEQ ID NO: 185362 - DNA, 25 bp, Saccharomyces pastorianus
accaaaaggttttctcaggacacag

SEQ ID NO: 185363 - DNA, 25 bp, Saccharomyces pastorianus
aatggtcttttggattggagctcat

SEQ ID NO: 185364 - DNA, 25 bp, Saccharomyces pastorianus
acagatttcgatgtttgtcaccaaa

SEQ ID NO: 185365 - DNA, 25 bp, Saccharomyces pastorianus
atcgacttgcatttgtgtcaacgga

SEQ ID NO: 185366 - DNA, 25 bp, Saccharomyces pastorianus
gcattaatcacgcaacaccaaaagg

SEQ ID NO: 185367 - DNA, 25 bp, Saccharomyces pastorianus
gaaattcggatcacttctaaaccag

SEQ ID NO: 185368 - DNA, 25 bp, Saccharomyces pastorianus
ggagctcattggtattcgattctat

SEQ ID NO: 185369 - DNA, 25 bp, Saccharomyces pastorianus
ggatacttccgtgtatctgatcgaa

SEQ ID NO: 185370 - DNA, 25 bp, Saccharomyces pastorianus
aagatttcattttcggtcggctatc

SEQ ID NO: 185371 - DNA, 25 bp, Saccharomyces pastorianus
aacaaatccggagctttcaaagagg

SEQ ID NO: 185372 - DNA, 25 bp, Saccharomyces pastorianus
cattgagcgacgatattttccgaat

SEQ ID NO: 185373 - DNA, 25 bp, Saccharomyces pastorianus
attgaatctgatgaggttcctcaac

SEQ ID NO: 185374 - DNA, 25 bp, Saccharomyces pastorianus
gaggttcctcaacaagagacaaaaa

SEQ ID NO: 185375 - DNA, 25 bp, Saccharomyces pastorianus
gagacaaaaaataacttacctagtg

SEQ ID NO: 185376 - DNA, 25 bp, Saccharomyces pastorianus
gacaaaaaataacttacctagtgca

SEQ ID NO: 185377 - DNA, 25 bp, Saccharomyces pastorianus
aaagaaggaaccgattgaatctgat

SEQ ID NO: 185378 - DNA, 25 bp, Saccharomyces pastorianus
gaaggaaccgattgaatctgatgag

SEQ ID NO: 185379 - DNA, 25 bp, Saccharomyces pastorianus
gaatctgatgaggttcctcaacaag

SEQ ID NO: 185380 - DNA, 25 bp, Saccharomyces pastorianus
gatgaggttcctcaacaagagacaa

SEQ ID NO: 185381 - DNA, 25 bp, Saccharomyces pastorianus
ccgattgaatctgatgaggttcctc

SEQ ID NO: 185382 - DNA, 25 bp, Saccharomyces pastorianus
gagtgggataaagaaggaaccgatt

SEQ ID NO: 185383 - DNA, 25 bp, Saccharomyces pastorianus
gattgaatctgatgaggttcctcaa

SEQ ID NO: 185384 - DNA, 25 bp, Saccharomyces pastorianus
ctggagaagcagtcttagagcatat

SEQ ID NO: 185385 - DNA, 25 bp, Saccharomyces pastorianus
tgtggtttgctctgttgtccccttg

SEQ ID NO: 185386 - DNA, 25 bp, Saccharomyces pastorianus
tagagcatatgtcagattcacaaga

SEQ ID NO: 185387 - DNA, 25 bp, Saccharomyces pastorianus
gtaactactgtggtttgttttgttg

SEQ ID NO: 185388 - DNA, 25 bp, Saccharomyces pastorianus
gttttgttgtttctgtggtttgctc

SEQ ID NO: 185389 - DNA, 25 bp, Saccharomyces pastorianus
ctgttgtccccttggtttgctttgt

SEQ ID NO: 185390 - DNA, 25 bp, Saccharomyces pastorianus
tgtccccttggtttgctttgttgtc

SEQ ID NO: 185391 - DNA, 25 bp, Saccharomyces pastorianus
cgccgctaacagtaacggtggccgt

SEQ ID NO: 185392 - DNA, 25 bp, Saccharomyces pastorianus
ggcaccatgtggtatactctgttgt

SEQ ID NO: 185393 - DNA, 25 bp, Saccharomyces pastorianus
cgtagtttgctttgttatctctgtg

SEQ ID NO: 185394 - DNA, 25 bp, Saccharomyces pastorianus
ttgctttgttgtctccgtagtttgc

SEQ ID NO: 185395 - DNA, 25 bp, Saccharomyces pastorianus
gggttgttttctgatcgcgtcttta

SEQ ID NO: 185396 - DNA, 25 bp, Saccharomyces pastorianus
ttctgatcgcgtctttatcttgtgt

SEQ ID NO: 185397 - DNA, 25 bp, Saccharomyces pastorianus
tcatcgggttgttttctgatcgcgt

SEQ ID NO: 185398 - DNA, 25 bp, Saccharomyces pastorianus
atcgggttgttttctgatcgcgtct

SEQ ID NO: 185399 - DNA, 25 bp, Saccharomyces pastorianus
tgatcgcgtctttatcttgtgtggg

SEQ ID NO: 185400 - DNA, 25 bp, Saccharomyces pastorianus
ttgttttctgatcgcgtctttatct

SEQ ID NO: 185401 - DNA, 25 bp, Saccharomyces pastorianus
accttattttcgctagtctttgata

SEQ ID NO: 185402 - DNA, 25 bp, Saccharomyces pastorianus
gaaaccttattttcgctagtctttg

SEQ ID NO: 185403 - DNA, 25 bp, Saccharomyces pastorianus
tattttcgctagtctttgatacggc

SEQ ID NO: 185404 - DNA, 25 bp, Saccharomyces pastorianus
ttcgctagtctttgatacggcgtat

SEQ ID NO: 185405 - DNA, 25 bp, Saccharomyces pastorianus
gggcttactgtatttgaaaccttat

SEQ ID NO: 185406 - DNA, 25 bp, Saccharomyces pastorianus
gtttctactttcttctcattgtata

SEQ ID NO: 185407 - DNA, 25 bp, Saccharomyces pastorianus
agccggtatctttctgggttactgt

SEQ ID NO: 185408 - DNA, 25 bp, Saccharomyces pastorianus
gaagattcaccgttagttactctgg

SEQ ID NO: 185409 - DNA, 25 bp, Saccharomyces pastorianus
gttgtgttttgcatggtctatcttc

SEQ ID NO: 185410 - DNA, 25 bp, Saccharomyces pastorianus
ttgtatactgttgaccgtttcggcc

SEQ ID NO: 185411 - DNA, 25 bp, Saccharomyces pastorianus
ctctgcctcgtggagcgaattagtc

SEQ ID NO: 185412 - DNA, 25 bp, Saccharomyces pastorianus
ttgctacatggtctatgcctctgta

SEQ ID NO: 185413 - DNA, 25 bp, Saccharomyces pastorianus
gaattaccaatcttccattgaggct

SEQ ID NO: 185414 - DNA, 25 bp, Saccharomyces pastorianus
ggccgtcgtaactgtctactgtggg

SEQ ID NO: 185415 - DNA, 25 bp, Saccharomyces pastorianus
gatgagttttgttcctgaatcccca

SEQ ID NO: 185416 - DNA, 25 bp, Saccharomyces pastorianus
caactgatgatcacagccggtatct

SEQ ID NO: 185417 - DNA, 25 bp, Saccharomyces pastorianus
gtttccatactggtaaggttctcag

SEQ ID NO: 185418 - DNA, 25 bp, Saccharomyces pastorianus
gatgaaggagctattattcctacaa

SEQ ID NO: 185419 - DNA, 25 bp, Saccharomyces pastorianus
gatacgtgcgtttccatactggtaa

SEQ ID NO: 185420 - DNA, 25 bp, Saccharomyces pastorianus
gtagctccaaatgtgttgatcaatt

SEQ ID NO: 185421 - DNA, 25 bp, Saccharomyces pastorianus
aggttctcagcgaatgtagctccaa

SEQ ID NO: 185422 - DNA, 25 bp, Saccharomyces pastorianus
gttttagccattgaaacttcctgtg

SEQ ID NO: 185423 - DNA, 25 bp, Saccharomyces pastorianus
agatactctggatagtgttgatgaa

SEQ ID NO: 185424 - DNA, 25 bp, Saccharomyces pastorianus
gagggtggcagattccttttaggta

SEQ ID NO: 185425 - DNA, 25 bp, Saccharomyces pastorianus
ggcagaagtctgtgttaaacaaacc

SEQ ID NO: 185426 - DNA, 25 bp, Saccharomyces pastorianus
gaaacttcctgtgacgatacgtgcg

SEQ ID NO: 185427 - DNA, 25 bp, Saccharomyces pastorianus
tattcctacaaaggctcatgtccat

SEQ ID NO: 185428 - DNA, 25 bp, Saccharomyces pastorianus
tgtccttttagccttttattcttgt

SEQ ID NO: 185429 - DNA, 25 bp, Saccharomyces pastorianus
caacgcttacgtttcgggaatgaag

SEQ ID NO: 185430 - DNA, 25 bp, Saccharomyces pastorianus
gtgctgcatatgtcaattctgtacc

SEQ ID NO: 185431 - DNA, 25 bp, Saccharomyces pastorianus
gcataccaatatttgtttggttcct

SEQ ID NO: 185432 - DNA, 25 bp, Saccharomyces pastorianus
taaccgttggtgctgcatatgtcaa

SEQ ID NO: 185433 - DNA, 25 bp, Saccharomyces pastorianus
gtaatgatttggtgcatactcaagt

SEQ ID NO: 185434 - DNA, 25 bp, Saccharomyces pastorianus
ggaagatttaggctttcaaggtaat

SEQ ID NO: 185435 - DNA, 25 bp, Saccharomyces pastorianus
ttattcttgtattgcttattgggtc

SEQ ID NO: 185436 - DNA, 25 bp, Saccharomyces pastorianus
atttcaattgccatttttgatttac

SEQ ID NO: 185437 - DNA, 25 bp, Saccharomyces pastorianus
ggatacggttaatataaacaacgct

SEQ ID NO: 185438 - DNA, 25 bp, Saccharomyces pastorianus
tatgttggtcgcttttaaccgttgg

SEQ ID NO: 185439 - DNA, 25 bp, Saccharomyces pastorianus
ggtaacatagcattcacccagatgg

SEQ ID NO: 185440 - DNA, 25 bp, Saccharomyces pastorianus
tcacaagcgctgtattcacaaatag

SEQ ID NO: 185441 - DNA, 25 bp, Saccharomyces pastorianus
aagcatgcagtagccattttgggta

SEQ ID NO: 185442 - DNA, 25 bp, Saccharomyces pastorianus
agatctattgtcttcctctgatttc

SEQ ID NO: 185443 - DNA, 25 bp, Saccharomyces pastorianus
aaaatttcggttccatcgcgactgt

SEQ ID NO: 185444 - DNA, 25 bp, Saccharomyces pastorianus
aagacctggtaaaagtatcgcaagc

SEQ ID NO: 185445 - DNA, 25 bp, Saccharomyces pastorianus
acgaatatcactctcatacttctcc

SEQ ID NO: 185446 - DNA, 25 bp, Saccharomyces pastorianus
gcgactgttttttgcgaagatctat

SEQ ID NO: 185447 - DNA, 25 bp, Saccharomyces pastorianus
tatagcaaattaccgccaagacctg

SEQ ID NO: 185448 - DNA, 25 bp, Saccharomyces pastorianus
caggtagaagatttgcctctgatat

SEQ ID NO: 185449 - DNA, 25 bp, Saccharomyces pastorianus
actctcttcactatatcacaagcgc

SEQ ID NO: 185450 - DNA, 25 bp, Saccharomyces pastorianus
gtgagatcatgatgtcccaatcaat

SEQ ID NO: 185451 - DNA, 25 bp, Saccharomyces pastorianus
tgcatctcaaattctgtccacagct

SEQ ID NO: 185452 - DNA, 25 bp, Saccharomyces pastorianus
atatatacctttgaacccattccgc

SEQ ID NO: 185453 - DNA, 25 bp, Saccharomyces pastorianus
agccttccctgattttttggagcga

SEQ ID NO: 185454 - DNA, 25 bp, Saccharomyces pastorianus
gatgaccaattctgcattgctgata

SEQ ID NO: 185455 - DNA, 25 bp, Saccharomyces pastorianus
tgaaaagctgttcagcgccgagcca

SEQ ID NO: 185456 - DNA, 25 bp, Saccharomyces pastorianus
agcgccgagccatttgtttcgcaaa

SEQ ID NO: 185457 - DNA, 25 bp, Saccharomyces pastorianus
accgaactaattgaagccttccctg

SEQ ID NO: 185458 - DNA, 25 bp, Saccharomyces pastorianus
tagttccatagcttctcccgagaaa

SEQ ID NO: 185459 - DNA, 25 bp, Saccharomyces pastorianus
gacattattgatacctctgcagcta

SEQ ID NO: 185460 - DNA, 25 bp, Saccharomyces pastorianus
ggtagattcctccaaaatttcgact

SEQ ID NO: 185461 - DNA, 25 bp, Saccharomyces pastorianus
gcatctatctattcattcacaccta

SEQ ID NO: 185462 - DNA, 25 bp, Saccharomyces pastorianus
gctctcggtgactcttacaccaata

SEQ ID NO: 185463 - DNA, 25 bp, Saccharomyces pastorianus
agacttgagttctatcacttccgtc

SEQ ID NO: 185464 - DNA, 25 bp, Saccharomyces pastorianus
gctgaagaaactggcgctgtctccg

SEQ ID NO: 185465 - DNA, 25 bp, Saccharomyces pastorianus
aaaatacgtcttctcatctgatcta

SEQ ID NO: 185466 - DNA, 25 bp, Saccharomyces pastorianus
gcggtgatctcacagttactggtaa

SEQ ID NO: 185467 - DNA, 25 bp, Saccharomyces pastorianus
gagcagcggtgacatttctttgagt

SEQ ID NO: 185468 - DNA, 25 bp, Saccharomyces pastorianus
gtctcgtcagctagtgcaagtgcca

SEQ ID NO: 185469 - DNA, 25 bp, Saccharomyces pastorianus
aagtaattgcaaccgaggccgtgga

SEQ ID NO: 185470 - DNA, 25 bp, Saccharomyces pastorianus
ggtaccgtttatttgccatccacaa

SEQ ID NO: 185471 - DNA, 25 bp, Saccharomyces pastorianus
cgctgccggtggtaagttgacttta

SEQ ID NO: 185472 - DNA, 25 bp, Saccharomyces pastorianus
taccgttcgtttgctcattattcta

SEQ ID NO: 185473 - DNA, 25 bp, Saccharomyces pastorianus
ggatgctctctcaaaatacgtcgaa

SEQ ID NO: 185474 - DNA, 25 bp, Saccharomyces pastorianus
tgcttttggcgtatggcgaatcttc

SEQ ID NO: 185475 - DNA, 25 bp, Saccharomyces pastorianus
gttgccagactatgcgctgatcgaa

SEQ ID NO: 185476 - DNA, 25 bp, Saccharomyces pastorianus
agattacaccagagcgttttccttc

SEQ ID NO: 185477 - DNA, 25 bp, Saccharomyces pastorianus
gcattttctgtagccgagtttatca

SEQ ID NO: 185478 - DNA, 25 bp, Saccharomyces pastorianus
taagatcctgttggcgtttgacaat

SEQ ID NO: 185479 - DNA, 25 bp, Saccharomyces pastorianus
gaatcttcgagtaccaacctggatg

SEQ ID NO: 185480 - DNA, 25 bp, Saccharomyces pastorianus
tttggataccaattcctgcgcttat

SEQ ID NO: 185481 - DNA, 25 bp, Saccharomyces pastorianus
aatgactattttgtgtaccgttcgt

SEQ ID NO: 185482 - DNA, 25 bp, Saccharomyces pastorianus
agcgttttccttcttgacaatcgtc

SEQ ID NO: 185483 - DNA, 25 bp, Saccharomyces pastorianus
aggactggtctcttgttcaaactgt

SEQ ID NO: 185484 - DNA, 25 bp, Saccharomyces pastorianus
attaaagttgccataccgtatcgtt

SEQ ID NO: 185485 - DNA, 25 bp, Saccharomyces pastorianus
attacgctggttactcttcttgttt

SEQ ID NO: 185486 - DNA, 25 bp, Saccharomyces pastorianus
gcaattgccaatccattacgctggt

SEQ ID NO: 185487 - DNA, 25 bp, Saccharomyces pastorianus
attgtttgaactctaccttggctgc

SEQ ID NO: 185488 - DNA, 25 bp, Saccharomyces pastorianus
ttgccatttatcaacgagctcccaa

SEQ ID NO: 185489 - DNA, 25 bp, Saccharomyces pastorianus
tttccgtagagaagctggttcccat

SEQ ID NO: 185490 - DNA, 25 bp, Saccharomyces pastorianus
tgtaccgactaccaatccagaaact

SEQ ID NO: 185491 - DNA, 25 bp, Saccharomyces pastorianus
gctggttcccatggtaaggacgctt

SEQ ID NO: 185492 - DNA, 25 bp, Saccharomyces pastorianus
tatcgttggtattgtctctggtgaa

SEQ ID NO: 185493 - DNA, 25 bp, Saccharomyces pastorianus
ggtgaaccagaattcttgccattta

SEQ ID NO: 185494 - DNA, 25 bp, Saccharomyces pastorianus
gaagacgctacttctgcatcttacc

SEQ ID NO: 185495 - DNA, 25 bp, Saccharomyces pastorianus
actgtcagtggcgttgctacggaat

SEQ ID NO: 185496 - DNA, 25 bp, Saccharomyces pastorianus
acagcaacgacgtgccttcgatttc

SEQ ID NO: 185497 - DNA, 25 bp, Saccharomyces pastorianus
gttactgataactctgtcaaccccg

SEQ ID NO: 185498 - DNA, 25 bp, Saccharomyces pastorianus
tgccttcggtttcagggactgctaa

SEQ ID NO: 185499 - DNA, 25 bp, Saccharomyces pastorianus
agcacatccaactaccatggctgat

SEQ ID NO: 185500 - DNA, 25 bp, Saccharomyces pastorianus
tgagactgccacttctgctatcttt

SEQ ID NO: 185501 - DNA, 25 bp, Saccharomyces pastorianus
agttactttctgtgagtctggcgtc

SEQ ID NO: 185502 - DNA, 25 bp, Saccharomyces pastorianus
attggccatagcagtagcgtgcctt

SEQ ID NO: 185503 - DNA, 25 bp, Saccharomyces pastorianus
gacttctgctgtcacaacaggcgaa

SEQ ID NO: 185504 - DNA, 25 bp, Saccharomyces pastorianus
cttaccgcgatcgtactactattga

SEQ ID NO: 185505 - DNA, 25 bp, Saccharomyces pastorianus
tgctttaaacggcttccgcggaaga

SEQ ID NO: 185506 - DNA, 25 bp, Saccharomyces pastorianus
aagaagtatttccatctcttgaatt

SEQ ID NO: 185507 - DNA, 25 bp, Saccharomyces pastorianus
gtctgctttaaacggcttccgcgga

SEQ ID NO: 185508 - DNA, 25 bp, Saccharomyces pastorianus
aagtatttccatctcttgaattcgt

SEQ ID NO: 185509 - DNA, 25 bp, Saccharomyces pastorianus
taaacggcttccgcggaagaagtat

SEQ ID NO: 185510 - DNA, 25 bp, Saccharomyces pastorianus
ctaagcctaaattcagtctgcttta

SEQ ID NO: 185511 - DNA, 25 bp, Saccharomyces pastorianus
gaagtatttccatctcttgaattcg

SEQ ID NO: 185512 - DNA, 25 bp, Saccharomyces pastorianus
agaagtatttccatctcttgaattc

SEQ ID NO: 185513 - DNA, 25 bp, Saccharomyces pastorianus
tctgctttaaacggcttccgcggaa

SEQ ID NO: 185514 - DNA, 25 bp, Saccharomyces pastorianus
tttccatctcttgaattcgtacaac

SEQ ID NO: 185515 - DNA, 25 bp, Saccharomyces pastorianus
gaagaagtatttccatctcttgaat

SEQ ID NO: 185516 - DNA, 25 bp, Saccharomyces pastorianus
gcgttattagcacggtgccttaacc

SEQ ID NO: 185517 - DNA, 25 bp, Saccharomyces pastorianus
aagagaccatgaaaactgtttgggg

SEQ ID NO: 185518 - DNA, 25 bp, Saccharomyces pastorianus
ccaagagaccatgaaaactgtttgg

SEQ ID NO: 185519 - DNA, 25 bp, Saccharomyces pastorianus
gccaagagaccatgaaaactgtttg

SEQ ID NO: 185520 - DNA, 25 bp, Saccharomyces pastorianus
tattagcacggtgccttaaccaact

SEQ ID NO: 185521 - DNA, 25 bp, Saccharomyces pastorianus
attagcacggtgccttaaccaactg

SEQ ID NO: 185522 - DNA, 25 bp, Saccharomyces pastorianus
agcacggtgccttaaccaactgggc

SEQ ID NO: 185523 - DNA, 25 bp, Saccharomyces pastorianus
ttattagcacggtgccttaaccaac

SEQ ID NO: 185524 - DNA, 25 bp, Saccharomyces pastorianus
gttattagcacggtgccttaaccaa

SEQ ID NO: 185525 - DNA, 25 bp, Saccharomyces pastorianus
agagaccatgaaaactgtttggggg

SEQ ID NO: 185526 - DNA, 25 bp, Saccharomyces pastorianus
caagagaccatgaaaactgtttggg

SEQ ID NO: 185527 - DNA, 25 bp, Saccharomyces pastorianus
accagtccaaacaacactattccaa

SEQ ID NO: 185528 - DNA, 25 bp, Saccharomyces pastorianus
tgccaactccatggcagctggtgtt

SEQ ID NO: 185529 - DNA, 25 bp, Saccharomyces pastorianus
aactcgactaccagtccaaacaaca

SEQ ID NO: 185530 - DNA, 25 bp, Saccharomyces pastorianus
caaacaacactattccaaacaacac

SEQ ID NO: 185531 - DNA, 25 bp, Saccharomyces pastorianus
aacgtgaccacgaccgtctcgaccg

SEQ ID NO: 185532 - DNA, 25 bp, Saccharomyces pastorianus
cgactaccagtccaaacaacactat

SEQ ID NO: 185533 - DNA, 25 bp, Saccharomyces pastorianus
gccacagtcactgctatacaagctg

SEQ ID NO: 185534 - DNA, 25 bp, Saccharomyces pastorianus
acaagctgccaactcgactaccagt

SEQ ID NO: 185535 - DNA, 25 bp, Saccharomyces pastorianus
tatacaagctgccaactcgactacc

SEQ ID NO: 185536 - DNA, 25 bp, Saccharomyces pastorianus
ttctagccacagtcactgctataca

SEQ ID NO: 185537 - DNA, 25 bp, Saccharomyces pastorianus
taacaacaccactcccaacgtgacc

SEQ ID NO: 185538 - DNA, 25 bp, Saccharomyces pastorianus
tatttgccacagtcggtgtcacaag

SEQ ID NO: 185539 - DNA, 25 bp, Saccharomyces pastorianus
gggctttttgatcggctttttcaca

SEQ ID NO: 185540 - DNA, 25 bp, Saccharomyces pastorianus
gccccaatttcctacgtcattgtag

SEQ ID NO: 185541 - DNA, 25 bp, Saccharomyces pastorianus
gaaaagaccagccatcgtcgcaaag

SEQ ID NO: 185542 - DNA, 25 bp, Saccharomyces pastorianus
tgttttgctattacttgggccccaa

SEQ ID NO: 185543 - DNA, 25 bp, Saccharomyces pastorianus
gattgtcaactttgcatccaccttt

SEQ ID NO: 185544 - DNA, 25 bp, Saccharomyces pastorianus
ctttgttgcgctatacatcgtcgat

SEQ ID NO: 185545 - DNA, 25 bp, Saccharomyces pastorianus
ggtttctcttatggctacgttttca

SEQ ID NO: 185546 - DNA, 25 bp, Saccharomyces pastorianus
gggtctgcatcaatggccatctgtt

SEQ ID NO: 185547 - DNA, 25 bp, Saccharomyces pastorianus
gccatctgttttgtcatatttgcca

SEQ ID NO: 185548 - DNA, 25 bp, Saccharomyces pastorianus
cgtccattgtgctcgggattgtcaa

SEQ ID NO: 185549 - DNA, 25 bp, Saccharomyces pastorianus
tgagtcggctctaaataacaaaaac

SEQ ID NO: 185550 - DNA, 25 bp, Saccharomyces pastorianus
cgataggcgtaagtttgaaaaagca

SEQ ID NO: 185551 - DNA, 25 bp, Saccharomyces pastorianus
acgagtttgagtcggctctaaataa

SEQ ID NO: 185552 - DNA, 25 bp, Saccharomyces pastorianus
gagtcggctctaaataacaaaaacg

SEQ ID NO: 185553 - DNA, 25 bp, Saccharomyces pastorianus
tttgagtcggctctaaataacaaaa

SEQ ID NO: 185554 - DNA, 25 bp, Saccharomyces pastorianus
gacgagtttgagtcggctctaaata

SEQ ID NO: 185555 - DNA, 25 bp, Saccharomyces pastorianus
tttgaaaaagcaaactttgacgagt

SEQ ID NO: 185556 - DNA, 25 bp, Saccharomyces pastorianus
agtttgagtcggctctaaataacaa

SEQ ID NO: 185557 - DNA, 25 bp, Saccharomyces pastorianus
gtttgagtcggctctaaataacaaa

SEQ ID NO: 185558 - DNA, 25 bp, Saccharomyces pastorianus
ttgagtcggctctaaataacaaaaa

SEQ ID NO: 185559 - DNA, 25 bp, Saccharomyces pastorianus
ggctctaaataacaaaaacgacttg

SEQ ID NO: 185560 - DNA, 25 bp, Saccharomyces pastorianus
aaacgcttggcatgttccagtaaca

SEQ ID NO: 185561 - DNA, 25 bp, Saccharomyces pastorianus
gatcatattacaaacgcttggcatg

SEQ ID NO: 185562 - DNA, 25 bp, Saccharomyces pastorianus
atattacaaacgcttggcatgttcc

SEQ ID NO: 185563 - DNA, 25 bp, Saccharomyces pastorianus
aacgcttggcatgttccagtaacag

SEQ ID NO: 185564 - DNA, 25 bp, Saccharomyces pastorianus
cgcttggcatgttccagtaacagca

SEQ ID NO: 185565 - DNA, 25 bp, Saccharomyces pastorianus
caaacgcttggcatgttccagtaac

SEQ ID NO: 185566 - DNA, 25 bp, Saccharomyces pastorianus
attacaaacgcttggcatgttccag

SEQ ID NO: 185567 - DNA, 25 bp, Saccharomyces pastorianus
ttacaaacgcttggcatgttccagt

SEQ ID NO: 185568 - DNA, 25 bp, Saccharomyces pastorianus
tcatattacaaacgcttggcatgtt

SEQ ID NO: 185569 - DNA, 25 bp, Saccharomyces pastorianus
acgcttggcatgttccagtaacagc

SEQ ID NO: 185570 - DNA, 25 bp, Saccharomyces pastorianus
acaaacgcttggcatgttccagtaa

SEQ ID NO: 185571 - DNA, 25 bp, Saccharomyces pastorianus
gtcgtggctatcatttcagaacttt

SEQ ID NO: 185572 - DNA, 25 bp, Saccharomyces pastorianus
agaacttttcatatctgttgacgtt

SEQ ID NO: 185573 - DNA, 25 bp, Saccharomyces pastorianus
ttttcatatctgttgacgttctcct

SEQ ID NO: 185574 - DNA, 25 bp, Saccharomyces pastorianus
gtggctatcatttcagaacttttca

SEQ ID NO: 185575 - DNA, 25 bp, Saccharomyces pastorianus
ggctatcatttcagaacttttcata

SEQ ID NO: 185576 - DNA, 25 bp, Saccharomyces pastorianus
ggtagaaattgtcgtggctatcatt

SEQ ID NO: 185577 - DNA, 25 bp, Saccharomyces pastorianus
tcgtggctatcatttcagaactttt

SEQ ID NO: 185578 - DNA, 25 bp, Saccharomyces pastorianus
tgaagtggtagaaattgtcgtggct

SEQ ID NO: 185579 - DNA, 25 bp, Saccharomyces pastorianus
ttcatatctgttgacgttctcctag

SEQ ID NO: 185580 - DNA, 25 bp, Saccharomyces pastorianus
ttgtcgtggctatcatttcagaact

SEQ ID NO: 185581 - DNA, 25 bp, Saccharomyces pastorianus
catatctgttgacgttctcctagta

SEQ ID NO: 185582 - DNA, 25 bp, Saccharomyces pastorianus
tagctttggattcttgtgcagcccg

SEQ ID NO: 185583 - DNA, 25 bp, Saccharomyces pastorianus
gattcttcctcaagttttttcagcc

SEQ ID NO: 185584 - DNA, 25 bp, Saccharomyces pastorianus
ttaatatcctcctcagcactttttt

SEQ ID NO: 185585 - DNA, 25 bp, Saccharomyces pastorianus
gaggatttcaactccgtttcattgc

SEQ ID NO: 185586 - DNA, 25 bp, Saccharomyces pastorianus
tttcaagctctccaggtctcgttta

SEQ ID NO: 185587 - DNA, 25 bp, Saccharomyces pastorianus
ctcgtttactatctcgctctattga

SEQ ID NO: 185588 - DNA, 25 bp, Saccharomyces pastorianus
gtttcattgctctcaatcgtactct

SEQ ID NO: 185589 - DNA, 25 bp, Saccharomyces pastorianus
gaagcttttcgtcatttctagttat

SEQ ID NO: 185590 - DNA, 25 bp, Saccharomyces pastorianus
gcccttcttcaactttagctttgga

SEQ ID NO: 185591 - DNA, 25 bp, Saccharomyces pastorianus
gtattatcgatctctttggctttta

SEQ ID NO: 185592 - DNA, 25 bp, Saccharomyces pastorianus
tctagttcactcctcgtattatcga

SEQ ID NO: 185593 - DNA, 25 bp, Saccharomyces pastorianus
tctgctgcgaagttagttgatctat

SEQ ID NO: 185594 - DNA, 25 bp, Saccharomyces pastorianus
tagttgatctatgtaaaaaagccag

SEQ ID NO: 185595 - DNA, 25 bp, Saccharomyces pastorianus
gaagcgctttctaatattatttttg

SEQ ID NO: 185596 - DNA, 25 bp, Saccharomyces pastorianus
atgacggaactttatctgctgcgaa

SEQ ID NO: 185597 - DNA, 25 bp, Saccharomyces pastorianus
gtatgctgatagagagattgactta

SEQ ID NO: 185598 - DNA, 25 bp, Saccharomyces pastorianus
aagccagaattttgcagtatgctga

SEQ ID NO: 185599 - DNA, 25 bp, Saccharomyces pastorianus
actttcccagggaagcgtgtatctg

SEQ ID NO: 185600 - DNA, 25 bp, Saccharomyces pastorianus
ggaagcgtgtatctgcatcattcaa

SEQ ID NO: 185601 - DNA, 25 bp, Saccharomyces pastorianus
gtgtatctgcatcattcaaaatcta

SEQ ID NO: 185602 - DNA, 25 bp, Saccharomyces pastorianus
tatttttggacgttatgacggaact

SEQ ID NO: 185603 - DNA, 25 bp, Saccharomyces pastorianus
tagtaaagtgttcagtatcagaagc

SEQ ID NO: 185604 - DNA, 25 bp, Saccharomyces pastorianus
gccccatagatgacctgaagttaca

SEQ ID NO: 185605 - DNA, 25 bp, Saccharomyces pastorianus
gaaatcgaagattcaagccccatag

SEQ ID NO: 185606 - DNA, 25 bp, Saccharomyces pastorianus
tcaagccccatagatgacctgaagt

SEQ ID NO: 185607 - DNA, 25 bp, Saccharomyces pastorianus
gtttattttggaccctgtgagatat

SEQ ID NO: 185608 - DNA, 25 bp, Saccharomyces pastorianus
atcgaagattcaagccccatagatg

SEQ ID NO: 185609 - DNA, 25 bp, Saccharomyces pastorianus
ttttggaccctgtgagatattgaca

SEQ ID NO: 185610 - DNA, 25 bp, Saccharomyces pastorianus
gatgacctgaagttacaaaaactgg

SEQ ID NO: 185611 - DNA, 25 bp, Saccharomyces pastorianus
gttacaaaaactggataccaatgtt

SEQ ID NO: 185612 - DNA, 25 bp, Saccharomyces pastorianus
gattcaagccccatagatgacctga

SEQ ID NO: 185613 - DNA, 25 bp, Saccharomyces pastorianus
caatgtttattttggaccctgtgag

SEQ ID NO: 185614 - DNA, 25 bp, Saccharomyces pastorianus
gataccaatgtttattttggaccct

SEQ ID NO: 185615 - DNA, 25 bp, Saccharomyces pastorianus
gtcaatctggcgtctatgaaggtga

SEQ ID NO: 185616 - DNA, 25 bp, Saccharomyces pastorianus
ggagcatcaacactcaaggcgagaa

SEQ ID NO: 185617 - DNA, 25 bp, Saccharomyces pastorianus
aagtcggttcgtgcagtttattctg

SEQ ID NO: 185618 - DNA, 25 bp, Saccharomyces pastorianus
gaagctgtgtctaggagcatcaaca

SEQ ID NO: 185619 - DNA, 25 bp, Saccharomyces pastorianus
ggtaagcgtgccattaattatcaaa

SEQ ID NO: 185620 - DNA, 25 bp, Saccharomyces pastorianus
aagaaactcaagtcggttcgtgcag

SEQ ID NO: 185621 - DNA, 25 bp, Saccharomyces pastorianus
tgtctcaggtgatggtaagcgtgcc

SEQ ID NO: 185622 - DNA, 25 bp, Saccharomyces pastorianus
ataatggtgctgacctagacgataa

SEQ ID NO: 185623 - DNA, 25 bp, Saccharomyces pastorianus
attctggtggtcaatctggcgtcta

SEQ ID NO: 185624 - DNA, 25 bp, Saccharomyces pastorianus
gacgataaggattacggttctgaag

SEQ ID NO: 185625 - DNA, 25 bp, Saccharomyces pastorianus
tggcggaattggctgaaaatgtctc

SEQ ID NO: 185626 - DNA, 25 bp, Saccharomyces pastorianus
caccaggaaattgttgagaaacttc

SEQ ID NO: 185627 - DNA, 25 bp, Saccharomyces pastorianus
aactcgaagaaacaattctatcact

SEQ ID NO: 185628 - DNA, 25 bp, Saccharomyces pastorianus
gaatcaggctttgattgcttcaaga

SEQ ID NO: 185629 - DNA, 25 bp, Saccharomyces pastorianus
tactgacgagttagctggaaaacaa

SEQ ID NO: 185630 - DNA, 25 bp, Saccharomyces pastorianus
gagaaacttcagaatcaggctttga

SEQ ID NO: 185631 - DNA, 25 bp, Saccharomyces pastorianus
gattgagcactcaaattcaagagtc

SEQ ID NO: 185632 - DNA, 25 bp, Saccharomyces pastorianus
gaaaattactgacgagttagctgga

SEQ ID NO: 185633 - DNA, 25 bp, Saccharomyces pastorianus
ttgcttcaagattgagcactcaaat

SEQ ID NO: 185634 - DNA, 25 bp, Saccharomyces pastorianus
aactatatggtgatccttctaccga

SEQ ID NO: 185635 - DNA, 25 bp, Saccharomyces pastorianus
tcaagagtcagaacacacacataag

SEQ ID NO: 185636 - DNA, 25 bp, Saccharomyces pastorianus
ctatatggtgatccttctaccgaac

SEQ ID NO: 185637 - DNA, 25 bp, Saccharomyces pastorianus
ataccaccgcaaatgcttttactgg

SEQ ID NO: 185638 - DNA, 25 bp, Saccharomyces pastorianus
ggagagctgcccttggcaaagtcaa

SEQ ID NO: 185639 - DNA, 25 bp, Saccharomyces pastorianus
cattaattccatattctccttcaca

SEQ ID NO: 185640 - DNA, 25 bp, Saccharomyces pastorianus
aagcaacgactcttccagtagttct

SEQ ID NO: 185641 - DNA, 25 bp, Saccharomyces pastorianus
aagtaccggcagtgacgttttagat

SEQ ID NO: 185642 - DNA, 25 bp, Saccharomyces pastorianus
agagaatttaaccactgacctgccc

SEQ ID NO: 185643 - DNA, 25 bp, Saccharomyces pastorianus
acagctccatttggataccgttctc

SEQ ID NO: 185644 - DNA, 25 bp, Saccharomyces pastorianus
aaaagctcatccagttataccaccg

SEQ ID NO: 185645 - DNA, 25 bp, Saccharomyces pastorianus
ggaaatgactcatcgcactctgatc

SEQ ID NO: 185646 - DNA, 25 bp, Saccharomyces pastorianus
aagtttgccaactcagtcaagcaca

SEQ ID NO: 185647 - DNA, 25 bp, Saccharomyces pastorianus
ttcctctgggaacaaatcatctagt

SEQ ID NO: 185648 - DNA, 25 bp, Saccharomyces pastorianus
tgcttccatgtgccagcctcatttt

SEQ ID NO: 185649 - DNA, 25 bp, Saccharomyces pastorianus
actgcttccatgtgccagcctcatt

SEQ ID NO: 185650 - DNA, 25 bp, Saccharomyces pastorianus
gaacaactgcttccatgtgccagcc

SEQ ID NO: 185651 - DNA, 25 bp, Saccharomyces pastorianus
ttgaacaactgcttccatgtgccag

SEQ ID NO: 185652 - DNA, 25 bp, Saccharomyces pastorianus
tgaacaactgcttccatgtgccagc

SEQ ID NO: 185653 - DNA, 25 bp, Saccharomyces pastorianus
aacaactgcttccatgtgccagcct

SEQ ID NO: 185654 - DNA, 25 bp, Saccharomyces pastorianus
catgtgccagcctcattttgcgtaa

SEQ ID NO: 185655 - DNA, 25 bp, Saccharomyces pastorianus
ctgcttccatgtgccagcctcattt

SEQ ID NO: 185656 - DNA, 25 bp, Saccharomyces pastorianus
caactgcttccatgtgccagcctca

SEQ ID NO: 185657 - DNA, 25 bp, Saccharomyces pastorianus
gttgaacaactgcttccatgtgcca

SEQ ID NO: 185658 - DNA, 25 bp, Saccharomyces pastorianus
acaactgcttccatgtgccagcctc

SEQ ID NO: 185659 - DNA, 25 bp, Saccharomyces pastorianus
cacccacatcattatgcacggcact

SEQ ID NO: 185660 - DNA, 25 bp, Saccharomyces pastorianus
cacatcattatgcacggcacttgcc

SEQ ID NO: 185661 - DNA, 25 bp, Saccharomyces pastorianus
acatcattatgcacggcacttgcct

SEQ ID NO: 185662 - DNA, 25 bp, Saccharomyces pastorianus
tgcacccacatcattatgcacggca

SEQ ID NO: 185663 - DNA, 25 bp, Saccharomyces pastorianus
atgcacccacatcattatgcacggc

SEQ ID NO: 185664 - DNA, 25 bp, Saccharomyces pastorianus
cccacatcattatgcacggcacttg

SEQ ID NO: 185665 - DNA, 25 bp, Saccharomyces pastorianus
gcacccacatcattatgcacggcac

SEQ ID NO: 185666 - DNA, 25 bp, Saccharomyces pastorianus
acccacatcattatgcacggcactt

SEQ ID NO: 185667 - DNA, 25 bp, Saccharomyces pastorianus
ccacatcattatgcacggcacttgc

SEQ ID NO: 185668 - DNA, 25 bp, Saccharomyces pastorianus
cacaacatgagaaatgggtaaatga

SEQ ID NO: 185669 - DNA, 25 bp, Saccharomyces pastorianus
tgtacacaacatgagaaatgggtaa

SEQ ID NO: 185670 - DNA, 25 bp, Saccharomyces pastorianus
agaaatgggtaaatgatgagataat

SEQ ID NO: 185671 - DNA, 25 bp, Saccharomyces pastorianus
atgagaaatgggtaaatgatgagat

SEQ ID NO: 185672 - DNA, 25 bp, Saccharomyces pastorianus
tgagaaatgggtaaatgatgagata

SEQ ID NO: 185673 - DNA, 25 bp, Saccharomyces pastorianus
gtacacaacatgagaaatgggtaaa

SEQ ID NO: 185674 - DNA, 25 bp, Saccharomyces pastorianus
caacatgagaaatgggtaaatgatg

SEQ ID NO: 185675 - DNA, 25 bp, Saccharomyces pastorianus
acacaacatgagaaatgggtaaatg

SEQ ID NO: 185676 - DNA, 25 bp, Saccharomyces pastorianus
tacacaacatgagaaatgggtaaat

SEQ ID NO: 185677 - DNA, 25 bp, Saccharomyces pastorianus
acaacatgagaaatgggtaaatgat

SEQ ID NO: 185678 - DNA, 25 bp, Saccharomyces pastorianus
gagaaatgggtaaatgatgagataa

SEQ ID NO: 185679 - DNA, 25 bp, Saccharomyces pastorianus
atctatatttctacatactaatatt

SEQ ID NO: 185680 - DNA, 25 bp, Saccharomyces pastorianus
tatatttctacatactaatattacg

SEQ ID NO: 185681 - DNA, 25 bp, Saccharomyces pastorianus
aatctatatttctacatactaatat

SEQ ID NO: 185682 - DNA, 25 bp, Saccharomyces pastorianus
gaatctatatttctacatactaata

SEQ ID NO: 185683 - DNA, 25 bp, Saccharomyces pastorianus
atactaatattacgattattcctca

SEQ ID NO: 185684 - DNA, 25 bp, Saccharomyces pastorianus
tggaatctatatttctacatactaa

SEQ ID NO: 185685 - DNA, 25 bp, Saccharomyces pastorianus
ttccgtttcatatgtctcattatcc

SEQ ID NO: 185686 - DNA, 25 bp, Saccharomyces pastorianus
atggaatctatatttctacatacta

SEQ ID NO: 185687 - DNA, 25 bp, Saccharomyces pastorianus
ctatatttctacatactaatattac

SEQ ID NO: 185688 - DNA, 25 bp, Saccharomyces pastorianus
tctatatttctacatactaatatta

SEQ ID NO: 185689 - DNA, 25 bp, Saccharomyces pastorianus
ggaatctatatttctacatactaat

SEQ ID NO: 185690 - DNA, 25 bp, Saccharomyces pastorianus
gcgtatacttatggttggtctagat

SEQ ID NO: 185691 - DNA, 25 bp, Saccharomyces pastorianus
tgtctggttagtcttcgctaacaaa

SEQ ID NO: 185692 - DNA, 25 bp, Saccharomyces pastorianus
tgcaacctcgggtgaaggtctgtac

SEQ ID NO: 185693 - DNA, 25 bp, Saccharomyces pastorianus
tattcagcaatctttttggcaacaa

SEQ ID NO: 185694 - DNA, 25 bp, Saccharomyces pastorianus
tatacgcttctaagttattcagcaa

SEQ ID NO: 185695 - DNA, 25 bp, Saccharomyces pastorianus
ggtgttatttttgtcatcgattcca

SEQ ID NO: 185696 - DNA, 25 bp, Saccharomyces pastorianus
caccgaaggtgttatttttgtcatc

SEQ ID NO: 185697 - DNA, 25 bp, Saccharomyces pastorianus
gagatgcgtatacttatggttggtc

SEQ ID NO: 185698 - DNA, 25 bp, Saccharomyces pastorianus
atggtttatccagtctacttgtgca

SEQ ID NO: 185699 - DNA, 25 bp, Saccharomyces pastorianus
agtctacttgtgcaacctcgggtga

SEQ ID NO: 185700 - DNA, 25 bp, Saccharomyces pastorianus
ttttgtcatcgattccaacgataga

SEQ ID NO: 185701 - DNA, 25 bp, Saccharomyces pastorianus
agttccatcctagccatgatacagt

SEQ ID NO: 185702 - DNA, 25 bp, Saccharomyces pastorianus
attggcggttcttcaaatgagttag

SEQ ID NO: 185703 - DNA, 25 bp, Saccharomyces pastorianus
ttttatcaatatgtcggtttaggta

SEQ ID NO: 185704 - DNA, 25 bp, Saccharomyces pastorianus
atgagttaggcatcgagctctgcga

SEQ ID NO: 185705 - DNA, 25 bp, Saccharomyces pastorianus
aaatattgacactatagacagtatt

SEQ ID NO: 185706 - DNA, 25 bp, Saccharomyces pastorianus
taggcatcgagctctgcgagacatt

SEQ ID NO: 185707 - DNA, 25 bp, Saccharomyces pastorianus
agtcctcgtaagtttttatcaatat

SEQ ID NO: 185708 - DNA, 25 bp, Saccharomyces pastorianus
catcctagccatgatacagtattaa

SEQ ID NO: 185709 - DNA, 25 bp, Saccharomyces pastorianus
cgagctctgcgagacatttatagaa

SEQ ID NO: 185710 - DNA, 25 bp, Saccharomyces pastorianus
taaaaagttccatcctagccatgat

SEQ ID NO: 185711 - DNA, 25 bp, Saccharomyces pastorianus
cagtattaatcattggcggttcttc

SEQ ID NO: 185712 - DNA, 25 bp, Saccharomyces pastorianus
cacacggccaagacatcggtatcaa

SEQ ID NO: 185713 - DNA, 25 bp, Saccharomyces pastorianus
tacgtagacaaagttcccaaggaca

SEQ ID NO: 185714 - DNA, 25 bp, Saccharomyces pastorianus
tcctcttttgttaacggtaaatgca

SEQ ID NO: 185715 - DNA, 25 bp, Saccharomyces pastorianus
cggtaaatgcaggaacagggacctt

SEQ ID NO: 185716 - DNA, 25 bp, Saccharomyces pastorianus
tgtcctgtcgaatttcccaagatag

SEQ ID NO: 185717 - DNA, 25 bp, Saccharomyces pastorianus
attttacgctgatggtggcgggtca

SEQ ID NO: 185718 - DNA, 25 bp, Saccharomyces pastorianus
aataaacaccaattcacacggccaa

SEQ ID NO: 185719 - DNA, 25 bp, Saccharomyces pastorianus
atcctccgaaaagccctgaactgaa

SEQ ID NO: 185720 - DNA, 25 bp, Saccharomyces pastorianus
ccaaggacagtacgccgtcgattca

SEQ ID NO: 185721 - DNA, 25 bp, Saccharomyces pastorianus
gaagacagaggtcatcctcttttgt

SEQ ID NO: 185722 - DNA, 25 bp, Saccharomyces pastorianus
cgtcgattcacatcctccgaaaagc

SEQ ID NO: 185723 - DNA, 25 bp, Saccharomyces pastorianus
tgacatatgtggtccctcatcttca

SEQ ID NO: 185724 - DNA, 25 bp, Saccharomyces pastorianus
ttggcgtatttctttgaagatgaca

SEQ ID NO: 185725 - DNA, 25 bp, Saccharomyces pastorianus
atgtggtccctcatcttcagagaaa

SEQ ID NO: 185726 - DNA, 25 bp, Saccharomyces pastorianus
ccattgcattttgaactatggccat

SEQ ID NO: 185727 - DNA, 25 bp, Saccharomyces pastorianus
gaagatgacatatgtggtccctcat

SEQ ID NO: 185728 - DNA, 25 bp, Saccharomyces pastorianus
gagaaacctgtgtctcagttaccat

SEQ ID NO: 185729 - DNA, 25 bp, Saccharomyces pastorianus
gggaatttggcgtatttctttgaag

SEQ ID NO: 185730 - DNA, 25 bp, Saccharomyces pastorianus
gtctcagttaccattgcattttgaa

SEQ ID NO: 185731 - DNA, 25 bp, Saccharomyces pastorianus
gtccctcatcttcagagaaacctgt

SEQ ID NO: 185732 - DNA, 25 bp, Saccharomyces pastorianus
ctgtgtctcagttaccattgcattt

SEQ ID NO: 185733 - DNA, 25 bp, Saccharomyces pastorianus
atgagaggagagtttacgggaattt

SEQ ID NO: 185734 - DNA, 25 bp, Saccharomyces pastorianus
ctgaagtctcacattccggtgaaaa

SEQ ID NO: 185735 - DNA, 25 bp, Saccharomyces pastorianus
gaaaatttcagctttaagcaatgaa

SEQ ID NO: 185736 - DNA, 25 bp, Saccharomyces pastorianus
ttccgaaaatttcagctttaagcaa

SEQ ID NO: 185737 - DNA, 25 bp, Saccharomyces pastorianus
catctcacatgttccgaaaatttca

SEQ ID NO: 185738 - DNA, 25 bp, Saccharomyces pastorianus
gaagtctcacattccggtgaaaaaa

SEQ ID NO: 185739 - DNA, 25 bp, Saccharomyces pastorianus
gcgccatctcacatgttccgaaaat

SEQ ID NO: 185740 - DNA, 25 bp, Saccharomyces pastorianus
gccatctcacatgttccgaaaattt

SEQ ID NO: 185741 - DNA, 25 bp, Saccharomyces pastorianus
gctcatagcgccatctcacatgttc

SEQ ID NO: 185742 - DNA, 25 bp, Saccharomyces pastorianus
cgccatctcacatgttccgaaaatt

SEQ ID NO: 185743 - DNA, 25 bp, Saccharomyces pastorianus
tagcgccatctcacatgttccgaaa

SEQ ID NO: 185744 - DNA, 25 bp, Saccharomyces pastorianus
atagcgccatctcacatgttccgaa

SEQ ID NO: 185745 - DNA, 25 bp, Saccharomyces pastorianus
tgccttattaaaaatggaatcccaa

SEQ ID NO: 185746 - DNA, 25 bp, Saccharomyces pastorianus
tattgccttattaaaaatggaatcc

SEQ ID NO: 185747 - DNA, 25 bp, Saccharomyces pastorianus
ttgtgtagaattgcagattcccttt

SEQ ID NO: 185748 - DNA, 25 bp, Saccharomyces pastorianus
tctagtacattctacatacctaata

SEQ ID NO: 185749 - DNA, 25 bp, Saccharomyces pastorianus
aacttctagtacattctacatacct

SEQ ID NO: 185750 - DNA, 25 bp, Saccharomyces pastorianus
tatggattcctaaatcctcgaggag

SEQ ID NO: 185751 - DNA, 25 bp, Saccharomyces pastorianus
ctagtacattctacatacctaatat

SEQ ID NO: 185752 - DNA, 25 bp, Saccharomyces pastorianus
ttgccttattaaaaatggaatccca

SEQ ID NO: 185753 - DNA, 25 bp, Saccharomyces pastorianus
taacggattttctggcatatctgca

SEQ ID NO: 185754 - DNA, 25 bp, Saccharomyces pastorianus
tctattgtggttctgcaaactttag

SEQ ID NO: 185755 - DNA, 25 bp, Saccharomyces pastorianus
gacgcaaattcggatactttcggtt

SEQ ID NO: 185756 - DNA, 25 bp, Saccharomyces pastorianus
atagcacagtttctaatggagtttt

SEQ ID NO: 185757 - DNA, 25 bp, Saccharomyces pastorianus
ttggcgctctatcaaaggtcttttg

SEQ ID NO: 185758 - DNA, 25 bp, Saccharomyces pastorianus
aaggtcttttgattcttcaaagagg

SEQ ID NO: 185759 - DNA, 25 bp, Saccharomyces pastorianus
tagttttaatgcttttggcgctcta

SEQ ID NO: 185760 - DNA, 25 bp, Saccharomyces pastorianus
aggtaacgactagcgccgattcaaa

SEQ ID NO: 185761 - DNA, 25 bp, Saccharomyces pastorianus
gcagctcctgttgatagcgacgcaa

SEQ ID NO: 185762 - DNA, 25 bp, Saccharomyces pastorianus
ctttgttttctcgaacttagccaat

SEQ ID NO: 185763 - DNA, 25 bp, Saccharomyces pastorianus
tttctggcatatctgcagagcagtt

SEQ ID NO: 185764 - DNA, 25 bp, Saccharomyces pastorianus
gaaaccctacccgttatccagagct

SEQ ID NO: 185765 - DNA, 25 bp, Saccharomyces pastorianus
tgccgggtcctcagcgcaacgtata

SEQ ID NO: 185766 - DNA, 25 bp, Saccharomyces pastorianus
gctttgccgggtcctcagcgcaacg

SEQ ID NO: 185767 - DNA, 25 bp, Saccharomyces pastorianus
accctacccgttatccagagcttca

SEQ ID NO: 185768 - DNA, 25 bp, Saccharomyces pastorianus
tttgccgggtcctcagcgcaacgta

SEQ ID NO: 185769 - DNA, 25 bp, Saccharomyces pastorianus
ttgccgggtcctcagcgcaacgtat

SEQ ID NO: 185770 - DNA, 25 bp, Saccharomyces pastorianus
ctttgccgggtcctcagcgcaacgt

SEQ ID NO: 185771 - DNA, 25 bp, Saccharomyces pastorianus
tactcgctttgccgggtcctcagcg

SEQ ID NO: 185772 - DNA, 25 bp, Saccharomyces pastorianus
gccgggtcctcagcgcaacgtatac

SEQ ID NO: 185773 - DNA, 25 bp, Saccharomyces pastorianus
cctacccgttatccagagcttcagc

SEQ ID NO: 185774 - DNA, 25 bp, Saccharomyces pastorianus
ctactcgctttgccgggtcctcagc

SEQ ID NO: 185775 - DNA, 25 bp, Saccharomyces pastorianus
acaacaacatcagcagcagcagcag

SEQ ID NO: 185776 - DNA, 25 bp, Saccharomyces pastorianus
cagcagcagcagcgacaacaacaac

SEQ ID NO: 185777 - DNA, 25 bp, Saccharomyces pastorianus
gcagcagcagcagcgacaacaacaa

SEQ ID NO: 185778 - DNA, 25 bp, Saccharomyces pastorianus
gcagcagcagcgacaacaacaacaa

SEQ ID NO: 185779 - DNA, 25 bp, Saccharomyces pastorianus
agcgacaacaacaacaacaacaaca

SEQ ID NO: 185780 - DNA, 25 bp, Saccharomyces pastorianus
gcagcagcaacagcagcaacaacag

SEQ ID NO: 185781 - DNA, 25 bp, Saccharomyces pastorianus
cagcagcaacatcagcaacagcatc

SEQ ID NO: 185782 - DNA, 25 bp, Saccharomyces pastorianus
gcaacaacatcaacagcagcagcaa

SEQ ID NO: 185783 - DNA, 25 bp, Saccharomyces pastorianus
agcagcagcagcgacaacaacaaca

SEQ ID NO: 185784 - DNA, 25 bp, Saccharomyces pastorianus
agcagcaacaacaacaacaacaaca

SEQ ID NO: 185785 - DNA, 25 bp, Saccharomyces pastorianus
agcagcagcgacaacaacaacaaca

SEQ ID NO: 185786 - DNA, 25 bp, Saccharomyces pastorianus
gagaatcttcacttcgggacagacc

SEQ ID NO: 185787 - DNA, 25 bp, Saccharomyces pastorianus
acgcggttttattcttgggcagtct

SEQ ID NO: 185788 - DNA, 25 bp, Saccharomyces pastorianus
gacactttgcaactcttgggattga

SEQ ID NO: 185789 - DNA, 25 bp, Saccharomyces pastorianus
aaactagtgagccatattgcggtca

SEQ ID NO: 185790 - DNA, 25 bp, Saccharomyces pastorianus
actggtgaccaaggctatcatcgag

SEQ ID NO: 185791 - DNA, 25 bp, Saccharomyces pastorianus
gcgggatatttctttatgtcacagg

SEQ ID NO: 185792 - DNA, 25 bp, Saccharomyces pastorianus
agaagaccacatccatcataccatt

SEQ ID NO: 185793 - DNA, 25 bp, Saccharomyces pastorianus
cacgtgtaattgttggttcccattt

SEQ ID NO: 185794 - DNA, 25 bp, Saccharomyces pastorianus
agtctttaccatgctgcaagtgcga

SEQ ID NO: 185795 - DNA, 25 bp, Saccharomyces pastorianus
atctgaccgtctgttttgcaatatg

SEQ ID NO: 185796 - DNA, 25 bp, Saccharomyces pastorianus
gctgaactccggcattgtctacaag

SEQ ID NO: 185797 - DNA, 25 bp, Saccharomyces pastorianus
agtgttaccgtcatcatcctcagag

SEQ ID NO: 185798 - DNA, 25 bp, Saccharomyces pastorianus
tgttaccgtcatcatcctcagagtc

SEQ ID NO: 185799 - DNA, 25 bp, Saccharomyces pastorianus
gagtcctcatcggtatcatcatctt

SEQ ID NO: 185800 - DNA, 25 bp, Saccharomyces pastorianus
gtcatcgtcctcactatcatcgtcc

SEQ ID NO: 185801 - DNA, 25 bp, Saccharomyces pastorianus
atcggtatcatcatcttcattgtcc

SEQ ID NO: 185802 - DNA, 25 bp, Saccharomyces pastorianus
atcatcctcagtgttaccgtcatca

SEQ ID NO: 185803 - DNA, 25 bp, Saccharomyces pastorianus
gtatcatcatcttcattgtcctcac

SEQ ID NO: 185804 - DNA, 25 bp, Saccharomyces pastorianus
atcatcctcagagtcctcatcggta

SEQ ID NO: 185805 - DNA, 25 bp, Saccharomyces pastorianus
cctcatcggtatcatcatcttcatt

SEQ ID NO: 185806 - DNA, 25 bp, Saccharomyces pastorianus
ccgtcctcactatcatcatcatcat

SEQ ID NO: 185807 - DNA, 25 bp, Saccharomyces pastorianus
tcagagtcctcatcggtatcatcat

SEQ ID NO: 185808 - DNA, 25 bp, Saccharomyces pastorianus
ataacacgatgactccaggcgggat

SEQ ID NO: 185809 - DNA, 25 bp, Saccharomyces pastorianus
tttgagaacctgtcagacaacatta

SEQ ID NO: 185810 - DNA, 25 bp, Saccharomyces pastorianus
caggcgggattaaccagtggcattt

SEQ ID NO: 185811 - DNA, 25 bp, Saccharomyces pastorianus
gcacgcctacagtactaatccatgg

SEQ ID NO: 185812 - DNA, 25 bp, Saccharomyces pastorianus
gaaggagaccactactgcagacgcc

SEQ ID NO: 185813 - DNA, 25 bp, Saccharomyces pastorianus
gtggcatttccacaataagcgtgcg

SEQ ID NO: 185814 - DNA, 25 bp, Saccharomyces pastorianus
acgccaaggtgtgtgctagcgtgca

SEQ ID NO: 185815 - DNA, 25 bp, Saccharomyces pastorianus
attatggatagcaccactgtgcgtg

SEQ ID NO: 185816 - DNA, 25 bp, Saccharomyces pastorianus
actgtgcgtgggtccgttaataaca

SEQ ID NO: 185817 - DNA, 25 bp, Saccharomyces pastorianus
gaacaaagtgtgcacgcctacagta

SEQ ID NO: 185818 - DNA, 25 bp, Saccharomyces pastorianus
actgcagacgccaaggtgtgtgcta

SEQ ID NO: 185819 - DNA, 25 bp, Saccharomyces pastorianus
aaatgagctgagtgttacgcaaaaa

SEQ ID NO: 185820 - DNA, 25 bp, Saccharomyces pastorianus
ataaatgagctgagtgttacgcaaa

SEQ ID NO: 185821 - DNA, 25 bp, Saccharomyces pastorianus
ctgagtgttacgcaaaaaggactta

SEQ ID NO: 185822 - DNA, 25 bp, Saccharomyces pastorianus
gagtgttacgcaaaaaggacttata

SEQ ID NO: 185823 - DNA, 25 bp, Saccharomyces pastorianus
gtgttacgcaaaaaggacttataat

SEQ ID NO: 185824 - DNA, 25 bp, Saccharomyces pastorianus
atgagctgagtgttacgcaaaaagg

SEQ ID NO: 185825 - DNA, 25 bp, Saccharomyces pastorianus
caataaatgagctgagtgttacgca

SEQ ID NO: 185826 - DNA, 25 bp, Saccharomyces pastorianus
aatgagctgagtgttacgcaaaaag

SEQ ID NO: 185827 - DNA, 25 bp, Saccharomyces pastorianus
ggcaacaacaataaatgagctgagt

SEQ ID NO: 185828 - DNA, 25 bp, Saccharomyces pastorianus
aaggacttataatgggagtacaaga

SEQ ID NO: 185829 - DNA, 25 bp, Saccharomyces pastorianus
gagctgagtgttacgcaaaaaggac

SEQ ID NO: 185830 - DNA, 25 bp, Saccharomyces pastorianus
tactccaaatgctacgcagccaaat

SEQ ID NO: 185831 - DNA, 25 bp, Saccharomyces pastorianus
ggcgaagccgtagttaataccatgg

SEQ ID NO: 185832 - DNA, 25 bp, Saccharomyces pastorianus
taccgcttcggtgactacgacagtt

SEQ ID NO: 185833 - DNA, 25 bp, Saccharomyces pastorianus
gttggcattgaacctaacgccacta

SEQ ID NO: 185834 - DNA, 25 bp, Saccharomyces pastorianus
acgcagccaaatactactcttccta

SEQ ID NO: 185835 - DNA, 25 bp, Saccharomyces pastorianus
gctatcaacgcccaagttggcattg

SEQ ID NO: 185836 - DNA, 25 bp, Saccharomyces pastorianus
acagtttcgattggcgaagccgtag

SEQ ID NO: 185837 - DNA, 25 bp, Saccharomyces pastorianus
agttaataccatggcggcgggtgcc

SEQ ID NO: 185838 - DNA, 25 bp, Saccharomyces pastorianus
ttctagctacagtcactgctatcaa

SEQ ID NO: 185839 - DNA, 25 bp, Saccharomyces pastorianus
taacgccactactccaaatgctacg

SEQ ID NO: 185840 - DNA, 25 bp, Saccharomyces pastorianus
gcagccaaatgctacgcagccaaat

SEQ ID NO: 185841 - DNA, 25 bp, Saccharomyces pastorianus
tggaggtttctgtgccattaccacc

SEQ ID NO: 185842 - DNA, 25 bp, Saccharomyces pastorianus
agtacactttttctgtgcttcatta

SEQ ID NO: 185843 - DNA, 25 bp, Saccharomyces pastorianus
tctactcttgtagtgatgccgccaa

SEQ ID NO: 185844 - DNA, 25 bp, Saccharomyces pastorianus
acgtagcgatggaggtttctgtgcc

SEQ ID NO: 185845 - DNA, 25 bp, Saccharomyces pastorianus
ctcatcgtaagtgtggacgtagcga

SEQ ID NO: 185846 - DNA, 25 bp, Saccharomyces pastorianus
accacaaccattctactcttgtagt

SEQ ID NO: 185847 - DNA, 25 bp, Saccharomyces pastorianus
ctcttgtagtgatgccgccaacgtg

SEQ ID NO: 185848 - DNA, 25 bp, Saccharomyces pastorianus
tctgtgcttcattatcgtagcgata

SEQ ID NO: 185849 - DNA, 25 bp, Saccharomyces pastorianus
actttttctgtgcttcattatcgta

SEQ ID NO: 185850 - DNA, 25 bp, Saccharomyces pastorianus
gataggtatatcactcatcgtaagt

SEQ ID NO: 185851 - DNA, 25 bp, Saccharomyces pastorianus
cgtagcgataggtatatcactcatc

SEQ ID NO: 185852 - DNA, 25 bp, Saccharomyces pastorianus
gatcatcaatagtcacgcaacggaa

SEQ ID NO: 185853 - DNA, 25 bp, Saccharomyces pastorianus
atcgccggactttaggagaccatga

SEQ ID NO: 185854 - DNA, 25 bp, Saccharomyces pastorianus
gatccaatccttattattgagcaag

SEQ ID NO: 185855 - DNA, 25 bp, Saccharomyces pastorianus
gacgtcttgtttctgtactctttga

SEQ ID NO: 185856 - DNA, 25 bp, Saccharomyces pastorianus
attcttcaagctatggaggcccgga

SEQ ID NO: 185857 - DNA, 25 bp, Saccharomyces pastorianus
gaaactaaggtcatctccatctgcc

SEQ ID NO: 185858 - DNA, 25 bp, Saccharomyces pastorianus
cattcctctagttccgtcaacgaaa

SEQ ID NO: 185859 - DNA, 25 bp, Saccharomyces pastorianus
tttgtaagcacctgatccaatcctt

SEQ ID NO: 185860 - DNA, 25 bp, Saccharomyces pastorianus
gacattgttgacagtctgatcatca

SEQ ID NO: 185861 - DNA, 25 bp, Saccharomyces pastorianus
gaggcccggaacgacattgttgaca

SEQ ID NO: 185862 - DNA, 25 bp, Saccharomyces pastorianus
gcaacggaaagtgatcgccggactt

SEQ ID NO: 185863 - DNA, 25 bp, Saccharomyces pastorianus
ggcacggccgttgccaatttcgagt

SEQ ID NO: 185864 - DNA, 25 bp, Saccharomyces pastorianus
agcgatcccggcgagcaagatcgta

SEQ ID NO: 185865 - DNA, 25 bp, Saccharomyces pastorianus
aggagatcaagaagcgcggcggcac

SEQ ID NO: 185866 - DNA, 25 bp, Saccharomyces pastorianus
ggccgttgccaatttcgagtccgtc

SEQ ID NO: 185867 - DNA, 25 bp, Saccharomyces pastorianus
aaggtcgtcgtcaacgatcccggcg

SEQ ID NO: 185868 - DNA, 25 bp, Saccharomyces pastorianus
tcgtcgtcaacgatcccggcgtggc

SEQ ID NO: 185869 - DNA, 25 bp, Saccharomyces pastorianus
aaggcgccaaggtcgtcgtcaacga

SEQ ID NO: 185870 - DNA, 25 bp, Saccharomyces pastorianus
cggaaggcgccaaggtcgtcgtcaa

SEQ ID NO: 185871 - DNA, 25 bp, Saccharomyces pastorianus
ggcgcctgccgaggaagtggtcgag

SEQ ID NO: 185872 - DNA, 25 bp, Saccharomyces pastorianus
gatcccggcgagcaagatcgtaaag

SEQ ID NO: 185873 - DNA, 25 bp, Saccharomyces pastorianus
aatttcgagtccgtcgccgaagcga

SEQ ID NO: 185874 - DNA, 25 bp, Saccharomyces pastorianus
ttgtataactgcaccatatactaac

SEQ ID NO: 185875 - DNA, 25 bp, Saccharomyces pastorianus
taactgcaccatatactaaccactc

SEQ ID NO: 185876 - DNA, 25 bp, Saccharomyces pastorianus
tattgtataactgcaccatatacta

SEQ ID NO: 185877 - DNA, 25 bp, Saccharomyces pastorianus
gtataactgcaccatatactaacca

SEQ ID NO: 185878 - DNA, 25 bp, Saccharomyces pastorianus
ataactgcaccatatactaaccact

SEQ ID NO: 185879 - DNA, 25 bp, Saccharomyces pastorianus
attgtataactgcaccatatactaa

SEQ ID NO: 185880 - DNA, 25 bp, Saccharomyces pastorianus
tataactgcaccatatactaaccac

SEQ ID NO: 185881 - DNA, 25 bp, Saccharomyces pastorianus
tgtataactgcaccatatactaacc

SEQ ID NO: 185882 - DNA, 25 bp, Saccharomyces pastorianus
aactgcaccatatactaaccactca

SEQ ID NO: 185883 - DNA, 25 bp, Saccharomyces pastorianus
ccatgacccatctctcaccatcagt

SEQ ID NO: 185884 - DNA, 25 bp, Saccharomyces pastorianus
atattgtataactgcaccatatact

SEQ ID NO: 185885 - DNA, 25 bp, Saccharomyces pastorianus
aaaagcatatcctaaactaccagat

SEQ ID NO: 185886 - DNA, 25 bp, Saccharomyces pastorianus
tcctcaccaaagtcaccaaaagcat

SEQ ID NO: 185887 - DNA, 25 bp, Saccharomyces pastorianus
acatccgaggtacatgagagctctc

SEQ ID NO: 185888 - DNA, 25 bp, Saccharomyces pastorianus
aatcgcgacttgatcttacatcctc

SEQ ID NO: 185889 - DNA, 25 bp, Saccharomyces pastorianus
aacgggctaaataccaatgaagtca

SEQ ID NO: 185890 - DNA, 25 bp, Saccharomyces pastorianus
gaagctcgcgattggattgcggtaa

SEQ ID NO: 185891 - DNA, 25 bp, Saccharomyces pastorianus
gagctctcgaagaaaatcgcgactt

SEQ ID NO: 185892 - DNA, 25 bp, Saccharomyces pastorianus
gatcttacatcctcaagattcgatt

SEQ ID NO: 185893 - DNA, 25 bp, Saccharomyces pastorianus
caagattcgatttataacgggctaa

SEQ ID NO: 185894 - DNA, 25 bp, Saccharomyces pastorianus
gtaaaatgtcacttgaacagagcaa

SEQ ID NO: 185895 - DNA, 25 bp, Saccharomyces pastorianus
gagcaaggactcttaccaaatatga

SEQ ID NO: 185896 - DNA, 25 bp, Saccharomyces pastorianus
ttatgccaatattacaaaaaaatca

SEQ ID NO: 185897 - DNA, 25 bp, Saccharomyces pastorianus
tctttttcaccgtatactaaccact

SEQ ID NO: 185898 - DNA, 25 bp, Saccharomyces pastorianus
tatacacttatgccaatattacaaa

SEQ ID NO: 185899 - DNA, 25 bp, Saccharomyces pastorianus
atacacttatgccaatattacaaaa

SEQ ID NO: 185900 - DNA, 25 bp, Saccharomyces pastorianus
ttatacctctttttcaccgtatact

SEQ ID NO: 185901 - DNA, 25 bp, Saccharomyces pastorianus
tacacttatgccaatattacaaaaa

SEQ ID NO: 185902 - DNA, 25 bp, Saccharomyces pastorianus
tgccaatattacaaaaaaatcacca

SEQ ID NO: 185903 - DNA, 25 bp, Saccharomyces pastorianus
catacgttatacctctttttcaccg

SEQ ID NO: 185904 - DNA, 25 bp, Saccharomyces pastorianus
tatacctctttttcaccgtatacta

SEQ ID NO: 185905 - DNA, 25 bp, Saccharomyces pastorianus
atgccaatattacaaaaaaatcacc

SEQ ID NO: 185906 - DNA, 25 bp, Saccharomyces pastorianus
tatgccaatattacaaaaaaatcac

SEQ ID NO: 185907 - DNA, 25 bp, Saccharomyces pastorianus
ggtatttgttttgtttgttagtgct

SEQ ID NO: 185908 - DNA, 25 bp, Saccharomyces pastorianus
gctgatgtaatcttaacaagaaata

SEQ ID NO: 185909 - DNA, 25 bp, Saccharomyces pastorianus
tttgaccatggtatttgttttgttt

SEQ ID NO: 185910 - DNA, 25 bp, Saccharomyces pastorianus
tgctgatgtaatcttaacaagaaat

SEQ ID NO: 185911 - DNA, 25 bp, Saccharomyces pastorianus
tagtgctgatgtaatcttaacaaga

SEQ ID NO: 185912 - DNA, 25 bp, Saccharomyces pastorianus
ttagtgctgatgtaatcttaacaag

SEQ ID NO: 185913 - DNA, 25 bp, Saccharomyces pastorianus
gattgaagttaatttgaccatggta

SEQ ID NO: 185914 - DNA, 25 bp, Saccharomyces pastorianus
agtgctgatgtaatcttaacaagaa

SEQ ID NO: 185915 - DNA, 25 bp, Saccharomyces pastorianus
gtgctgatgtaatcttaacaagaaa

SEQ ID NO: 185916 - DNA, 25 bp, Saccharomyces pastorianus
gttagtgctgatgtaatcttaacaa

SEQ ID NO: 185917 - DNA, 25 bp, Saccharomyces pastorianus
agcgattgaagttaatttgaccatg

SEQ ID NO: 185918 - DNA, 25 bp, Saccharomyces pastorianus
atctactaactagtatttatgttac

SEQ ID NO: 185919 - DNA, 25 bp, Saccharomyces pastorianus
ctactaactagtatttatgttacta

SEQ ID NO: 185920 - DNA, 25 bp, Saccharomyces pastorianus
tctactaactagtatttatgttact

SEQ ID NO: 185921 - DNA, 25 bp, Saccharomyces pastorianus
tgttactagtatattatcatatacg

SEQ ID NO: 185922 - DNA, 25 bp, Saccharomyces pastorianus
catctactaactagtatttatgtta

SEQ ID NO: 185923 - DNA, 25 bp, Saccharomyces pastorianus
tatgttactagtatattatcatata

SEQ ID NO: 185924 - DNA, 25 bp, Saccharomyces pastorianus
gaataaaaatcaactatcatctact

SEQ ID NO: 185925 - DNA, 25 bp, Saccharomyces pastorianus
ggaataaaaatcaactatcatctac

SEQ ID NO: 185926 - DNA, 25 bp, Saccharomyces pastorianus
aataaaaatcaactatcatctacta

SEQ ID NO: 185927 - DNA, 25 bp, Saccharomyces pastorianus
tcatctactaactagtatttatgtt

SEQ ID NO: 185928 - DNA, 25 bp, Saccharomyces pastorianus
gttggaataaaaatcaactatcatc

SEQ ID NO: 185929 - DNA, 25 bp, Saccharomyces pastorianus
ctctagaaggtcgacaagatcggaa

SEQ ID NO: 185930 - DNA, 25 bp, Saccharomyces pastorianus
tggtctctagaaggtcgacaagatc

SEQ ID NO: 185931 - DNA, 25 bp, Saccharomyces pastorianus
tcgacaagatcggaaagcacctcaa

SEQ ID NO: 185932 - DNA, 25 bp, Saccharomyces pastorianus
gccttggtctctagaaggtcgacaa

SEQ ID NO: 185933 - DNA, 25 bp, Saccharomyces pastorianus
atggccttggtctctagaaggtcga

SEQ ID NO: 185934 - DNA, 25 bp, Saccharomyces pastorianus
cgacaagatcggaaagcacctcaat

SEQ ID NO: 185935 - DNA, 25 bp, Saccharomyces pastorianus
ggtcgacaagatcggaaagcacctc

SEQ ID NO: 185936 - DNA, 25 bp, Saccharomyces pastorianus
ggccttggtctctagaaggtcgaca

SEQ ID NO: 185937 - DNA, 25 bp, Saccharomyces pastorianus
gtctctagaaggtcgacaagatcgg

SEQ ID NO: 185938 - DNA, 25 bp, Saccharomyces pastorianus
ttggtctctagaaggtcgacaagat

SEQ ID NO: 185939 - DNA, 25 bp, Saccharomyces pastorianus
tggccttggtctctagaaggtcgac

SEQ ID NO: 185940 - DNA, 25 bp, Saccharomyces pastorianus
atccattattatgtataccgtatta

SEQ ID NO: 185941 - DNA, 25 bp, Saccharomyces pastorianus
atagttgtcggatggcaatccatta

SEQ ID NO: 185942 - DNA, 25 bp, Saccharomyces pastorianus
gtataccgtattattaagagtgcaa

SEQ ID NO: 185943 - DNA, 25 bp, Saccharomyces pastorianus
actggctatagttgtcggatggcaa

SEQ ID NO: 185944 - DNA, 25 bp, Saccharomyces pastorianus
ggctatagttgtcggatggcaatcc

SEQ ID NO: 185945 - DNA, 25 bp, Saccharomyces pastorianus
taagagtgcaactaggcccgactat

SEQ ID NO: 185946 - DNA, 25 bp, Saccharomyces pastorianus
ttaagagtgcaactaggcccgacta

SEQ ID NO: 185947 - DNA, 25 bp, Saccharomyces pastorianus
gtcggatggcaatccattattatgt

SEQ ID NO: 185948 - DNA, 25 bp, Saccharomyces pastorianus
ggcaatccattattatgtataccgt

SEQ ID NO: 185949 - DNA, 25 bp, Saccharomyces pastorianus
tattaagagtgcaactaggcccgac

SEQ ID NO: 185950 - DNA, 25 bp, Saccharomyces pastorianus
gttgtcggatggcaatccattatta

SEQ ID NO: 185951 - DNA, 25 bp, Saccharomyces pastorianus
ctgtgtacgttgttgactgtgtcat

SEQ ID NO: 185952 - DNA, 25 bp, Saccharomyces pastorianus
gatactacgactatgaccacggttc

SEQ ID NO: 185953 - DNA, 25 bp, Saccharomyces pastorianus
tgtcatcagtactcgctaccccagt

SEQ ID NO: 185954 - DNA, 25 bp, Saccharomyces pastorianus
tacgactatgaccacggttccctcg

SEQ ID NO: 185955 - DNA, 25 bp, Saccharomyces pastorianus
agacccttcttccattcaatttgtt

SEQ ID NO: 185956 - DNA, 25 bp, Saccharomyces pastorianus
gactgtgtcatcagtactcgctacc

SEQ ID NO: 185957 - DNA, 25 bp, Saccharomyces pastorianus
cccttcttccattcaatttgttcat

SEQ ID NO: 185958 - DNA, 25 bp, Saccharomyces pastorianus
tcgcttaaaacgttactgtgtacgt

SEQ ID NO: 185959 - DNA, 25 bp, Saccharomyces pastorianus
gttactgtgtacgttgttgactgtg

SEQ ID NO: 185960 - DNA, 25 bp, Saccharomyces pastorianus
aaagatactacgactatgaccacgg

SEQ ID NO: 185961 - DNA, 25 bp, Saccharomyces pastorianus
gttccctcggagaaccaatccgtgg

SEQ ID NO: 185962 - DNA, 25 bp, Saccharomyces pastorianus
ggtgctgatttagctcagagtttac

SEQ ID NO: 185963 - DNA, 25 bp, Saccharomyces pastorianus
tacaatccaaagttcttcctccgaa

SEQ ID NO: 185964 - DNA, 25 bp, Saccharomyces pastorianus
gaagccagctcgacaaactctgttc

SEQ ID NO: 185965 - DNA, 25 bp, Saccharomyces pastorianus
gggtggtgtcgcaacatcaagtaat

SEQ ID NO: 185966 - DNA, 25 bp, Saccharomyces pastorianus
gtatcatcggacagtcctgtacaag

SEQ ID NO: 185967 - DNA, 25 bp, Saccharomyces pastorianus
cccaacaatcttccgtatcatcgga

SEQ ID NO: 185968 - DNA, 25 bp, Saccharomyces pastorianus
accagttctactacccaaatatcaa

SEQ ID NO: 185969 - DNA, 25 bp, Saccharomyces pastorianus
gtgagtccattatttcctccactaa

SEQ ID NO: 185970 - DNA, 25 bp, Saccharomyces pastorianus
taatgacgtgaccagttctactacc

SEQ ID NO: 185971 - DNA, 25 bp, Saccharomyces pastorianus
gttcaaatttctaacggtgctgatt

SEQ ID NO: 185972 - DNA, 25 bp, Saccharomyces pastorianus
actaggtctacagttgccccaacta

SEQ ID NO: 185973 - DNA, 25 bp, Saccharomyces pastorianus
actctcactttccactccatcaccc

SEQ ID NO: 185974 - DNA, 25 bp, Saccharomyces pastorianus
tctcactttccactccatcacccat

SEQ ID NO: 185975 - DNA, 25 bp, Saccharomyces pastorianus
cactttccactccatcacccatctc

SEQ ID NO: 185976 - DNA, 25 bp, Saccharomyces pastorianus
actttccactccatcacccatctct

SEQ ID NO: 185977 - DNA, 25 bp, Saccharomyces pastorianus
tcactttccactccatcacccatct

SEQ ID NO: 185978 - DNA, 25 bp, Saccharomyces pastorianus
ctactctcactttccactccatcac

SEQ ID NO: 185979 - DNA, 25 bp, Saccharomyces pastorianus
ctctcactttccactccatcaccca

SEQ ID NO: 185980 - DNA, 25 bp, Saccharomyces pastorianus
tactctcactttccactccatcacc

SEQ ID NO: 185981 - DNA, 25 bp, Saccharomyces pastorianus
cctactctcactttccactccatca

SEQ ID NO: 185982 - DNA, 25 bp, Saccharomyces pastorianus
ccatcacccatctctcaccatcagt

SEQ ID NO: 185983 - DNA, 25 bp, Saccharomyces pastorianus
tttccactccatcacccatctctca

SEQ ID NO: 185984 - DNA, 25 bp, Saccharomyces pastorianus
tcagtctcgagaaggatttggcaat

SEQ ID NO: 185985 - DNA, 25 bp, Saccharomyces pastorianus
gaaggttcttcatttgaccaaaaat

SEQ ID NO: 185986 - DNA, 25 bp, Saccharomyces pastorianus
gagcgcactactgagtccaaattca

SEQ ID NO: 185987 - DNA, 25 bp, Saccharomyces pastorianus
ctggccagaagttgagcgcactact

SEQ ID NO: 185988 - DNA, 25 bp, Saccharomyces pastorianus
aatggaaccaataccgctggccaga

SEQ ID NO: 185989 - DNA, 25 bp, Saccharomyces pastorianus
ctgctgtcccgtcaatttcagaaga

SEQ ID NO: 185990 - DNA, 25 bp, Saccharomyces pastorianus
gtaaccgttatatatcctgctgtcc

SEQ ID NO: 185991 - DNA, 25 bp, Saccharomyces pastorianus
gaccccgaccgacttaaatgatgca

SEQ ID NO: 185992 - DNA, 25 bp, Saccharomyces pastorianus
gagtcaaattcatgtacacggctga

SEQ ID NO: 185993 - DNA, 25 bp, Saccharomyces pastorianus
gctgcagagatgatcaactcccaaa

SEQ ID NO: 185994 - DNA, 25 bp, Saccharomyces pastorianus
atttcacaacgatttccaacgcttc

SEQ ID NO: 185995 - DNA, 25 bp, Saccharomyces pastorianus
aggccacgtaggatccgttcagata

SEQ ID NO: 185996 - DNA, 25 bp, Saccharomyces pastorianus
gaacttaaattcatggctgcgtctg

SEQ ID NO: 185997 - DNA, 25 bp, Saccharomyces pastorianus
tccaccccgggatcagtatcattaa

SEQ ID NO: 185998 - DNA, 25 bp, Saccharomyces pastorianus
gaaggccttgaactactcggttgga

SEQ ID NO: 185999 - DNA, 25 bp, Saccharomyces pastorianus
gctggtacctcaattaggccacgta

SEQ ID NO: 186000 - DNA, 25 bp, Saccharomyces pastorianus
aattacttctctctgaccgtatcac

SEQ ID NO: 186001 - DNA, 25 bp, Saccharomyces pastorianus
agatgcatcgtccagtacacttttt

SEQ ID NO: 186002 - DNA, 25 bp, Saccharomyces pastorianus
aagcgcttataacctgaccgacgaa

SEQ ID NO: 186003 - DNA, 25 bp, Saccharomyces pastorianus
aagcaacatccctgacatcggagac

SEQ ID NO: 186004 - DNA, 25 bp, Saccharomyces pastorianus
tcaagactgttgtgctggtacctca

SEQ ID NO: 186005 - DNA, 25 bp, Saccharomyces pastorianus
tcggttggatccatacccagacaga

SEQ ID NO: 186006 - DNA, 25 bp, Saccharomyces pastorianus
gttggaagtctgcttgttcttacca

SEQ ID NO: 186007 - DNA, 25 bp, Saccharomyces pastorianus
tgttcttaccagtttcacccaagta

SEQ ID NO: 186008 - DNA, 25 bp, Saccharomyces pastorianus
gtcatccaattcaaccaacttagag

SEQ ID NO: 186009 - DNA, 25 bp, Saccharomyces pastorianus
caagtatctgttctttggaccaaaa

SEQ ID NO: 186010 - DNA, 25 bp, Saccharomyces pastorianus
aattcttttcaagttggcgacagtg

SEQ ID NO: 186011 - DNA, 25 bp, Saccharomyces pastorianus
tcttgctcgaaatctggatggtggt

SEQ ID NO: 186012 - DNA, 25 bp, Saccharomyces pastorianus
gtttcacccaagtatctgttctttg

SEQ ID NO: 186013 - DNA, 25 bp, Saccharomyces pastorianus
gaagtgcttagattcttgctcgaaa

SEQ ID NO: 186014 - DNA, 25 bp, Saccharomyces pastorianus
aagttggcgacagtgttcttgatgt

SEQ ID NO: 186015 - DNA, 25 bp, Saccharomyces pastorianus
ggtggaacggttagagacttcatta

SEQ ID NO: 186016 - DNA, 25 bp, Saccharomyces pastorianus
cgacaatgtcgatacctctgtttct

SEQ ID NO: 186017 - DNA, 25 bp, Saccharomyces pastorianus
atgccaatattacgattattcctca

SEQ ID NO: 186018 - DNA, 25 bp, Saccharomyces pastorianus
tctatatttctatatgccaatatta

SEQ ID NO: 186019 - DNA, 25 bp, Saccharomyces pastorianus
tatatgccaatattacgattattcc

SEQ ID NO: 186020 - DNA, 25 bp, Saccharomyces pastorianus
ccaatattacgattattcctcattc

SEQ ID NO: 186021 - DNA, 25 bp, Saccharomyces pastorianus
tatgccaatattacgattattcctc

SEQ ID NO: 186022 - DNA, 25 bp, Saccharomyces pastorianus
caatattacgattattcctcattcc

SEQ ID NO: 186023 - DNA, 25 bp, Saccharomyces pastorianus
atatgccaatattacgattattcct

SEQ ID NO: 186024 - DNA, 25 bp, Saccharomyces pastorianus
ctatatgccaatattacgattattc

SEQ ID NO: 186025 - DNA, 25 bp, Saccharomyces pastorianus
tgccaatattacgattattcctcat

SEQ ID NO: 186026 - DNA, 25 bp, Saccharomyces pastorianus
gccaatattacgattattcctcatt

SEQ ID NO: 186027 - DNA, 25 bp, Saccharomyces pastorianus
tctatatgccaatattacgattatt

SEQ ID NO: 186028 - DNA, 25 bp, Saccharomyces pastorianus
cgcggtcattttgttagtatctctt

SEQ ID NO: 186029 - DNA, 25 bp, Saccharomyces pastorianus
tcaacttgggcagcacaatttcacg

SEQ ID NO: 186030 - DNA, 25 bp, Saccharomyces pastorianus
cattttgttagtatctcttctcaac

SEQ ID NO: 186031 - DNA, 25 bp, Saccharomyces pastorianus
ttgttagtatctcttctcaacttgg

SEQ ID NO: 186032 - DNA, 25 bp, Saccharomyces pastorianus
caatttcacgatatttaacaggtat

SEQ ID NO: 186033 - DNA, 25 bp, Saccharomyces pastorianus
gttagtatctcttctcaacttgggc

SEQ ID NO: 186034 - DNA, 25 bp, Saccharomyces pastorianus
ggtcattttgttagtatctcttctc

SEQ ID NO: 186035 - DNA, 25 bp, Saccharomyces pastorianus
gtcattttgttagtatctcttctca

SEQ ID NO: 186036 - DNA, 25 bp, Saccharomyces pastorianus
gcggtcattttgttagtatctcttc

SEQ ID NO: 186037 - DNA, 25 bp, Saccharomyces pastorianus
gtatctcttctcaacttgggcagca

SEQ ID NO: 186038 - DNA, 25 bp, Saccharomyces pastorianus
tagtatctcttctcaacttgggcag

SEQ ID NO: 186039 - DNA, 25 bp, Saccharomyces pastorianus
gattcctgaagagttgtcgccatcc

SEQ ID NO: 186040 - DNA, 25 bp, Saccharomyces pastorianus
ctaagtgatgttctggtctttccaa

SEQ ID NO: 186041 - DNA, 25 bp, Saccharomyces pastorianus
tgccctccatcatcctaaagataga

SEQ ID NO: 186042 - DNA, 25 bp, Saccharomyces pastorianus
gttctgggttgtggactgacactat

SEQ ID NO: 186043 - DNA, 25 bp, Saccharomyces pastorianus
gaagacttcagttcggtacttggat

SEQ ID NO: 186044 - DNA, 25 bp, Saccharomyces pastorianus
ttatacaagcaaaacctggccaccc

SEQ ID NO: 186045 - DNA, 25 bp, Saccharomyces pastorianus
ctggccaccctgttttgagggaaat

SEQ ID NO: 186046 - DNA, 25 bp, Saccharomyces pastorianus
gtcgccatccgacattgggttgata

SEQ ID NO: 186047 - DNA, 25 bp, Saccharomyces pastorianus
tgttcagccaattccaaactggatt

SEQ ID NO: 186048 - DNA, 25 bp, Saccharomyces pastorianus
gtttatgctgacatcgacacgttcc

SEQ ID NO: 186049 - DNA, 25 bp, Saccharomyces pastorianus
gacactattttcacgtatttcactg

SEQ ID NO: 186050 - DNA, 25 bp, Saccharomyces pastorianus
gcactacaatctatctcgtcgttaa

SEQ ID NO: 186051 - DNA, 25 bp, Saccharomyces pastorianus
gactttgtcgctgaaatctatggca

SEQ ID NO: 186052 - DNA, 25 bp, Saccharomyces pastorianus
tttaatctcaacaactgccgcacta

SEQ ID NO: 186053 - DNA, 25 bp, Saccharomyces pastorianus
tatctcgtcgttaacaatttccctt

SEQ ID NO: 186054 - DNA, 25 bp, Saccharomyces pastorianus
ttacgcgtccgattatgccagttac

SEQ ID NO: 186055 - DNA, 25 bp, Saccharomyces pastorianus
agcattgccacatatgcatcggtca

SEQ ID NO: 186056 - DNA, 25 bp, Saccharomyces pastorianus
atactatggtatccactgcttggcc

SEQ ID NO: 186057 - DNA, 25 bp, Saccharomyces pastorianus
atccaaagtcatcgattcacctgaa

SEQ ID NO: 186058 - DNA, 25 bp, Saccharomyces pastorianus
tggtcgattctctagcaactttcac

SEQ ID NO: 186059 - DNA, 25 bp, Saccharomyces pastorianus
gcatcggtcacaggtttattcactc

SEQ ID NO: 186060 - DNA, 25 bp, Saccharomyces pastorianus
gtatccactgcttggccgtaagaaa

SEQ ID NO: 186061 - DNA, 25 bp, Saccharomyces pastorianus
aaatactgctcagacaccactaggc

SEQ ID NO: 186062 - DNA, 25 bp, Saccharomyces pastorianus
gacaccactaggcactaaattcttt

SEQ ID NO: 186063 - DNA, 25 bp, Saccharomyces pastorianus
gcacccgtaaatggagctgctattt

SEQ ID NO: 186064 - DNA, 25 bp, Saccharomyces pastorianus
gcaacaacggcaacgacaataacag

SEQ ID NO: 186065 - DNA, 25 bp, Saccharomyces pastorianus
accgggttgactccatacataaata

SEQ ID NO: 186066 - DNA, 25 bp, Saccharomyces pastorianus
tgctgccaccgcatataatggaaat

SEQ ID NO: 186067 - DNA, 25 bp, Saccharomyces pastorianus
gctatttcagaacatactaccgatg

SEQ ID NO: 186068 - DNA, 25 bp, Saccharomyces pastorianus
agtacatatgatgctgctgccaccg

SEQ ID NO: 186069 - DNA, 25 bp, Saccharomyces pastorianus
gtaataatgaacatgcacccgtaaa

SEQ ID NO: 186070 - DNA, 25 bp, Saccharomyces pastorianus
gaacaatcagtccaactcaagtaca

SEQ ID NO: 186071 - DNA, 25 bp, Saccharomyces pastorianus
actaccgatggtgactcgaacaatc

SEQ ID NO: 186072 - DNA, 25 bp, Saccharomyces pastorianus
caggtttcactgatgctaatggcaa

SEQ ID NO: 186073 - DNA, 25 bp, Saccharomyces pastorianus
tgttccattaatggaccgtgttctt

SEQ ID NO: 186074 - DNA, 25 bp, Saccharomyces pastorianus
ttgccgtaggcccaggtttcactga

SEQ ID NO: 186075 - DNA, 25 bp, Saccharomyces pastorianus
aatgtctacccttttgaagtccgct

SEQ ID NO: 186076 - DNA, 25 bp, Saccharomyces pastorianus
gttcatctgccctcgaggaaactaa

SEQ ID NO: 186077 - DNA, 25 bp, Saccharomyces pastorianus
gaggaaactaaaccgaactatcgat

SEQ ID NO: 186078 - DNA, 25 bp, Saccharomyces pastorianus
ctatgttcatctgccctcgaggaaa

SEQ ID NO: 186079 - DNA, 25 bp, Saccharomyces pastorianus
gcttccggtctatatttgcctgaaa

SEQ ID NO: 186080 - DNA, 25 bp, Saccharomyces pastorianus
taggcccaggtttcactgatgctaa

SEQ ID NO: 186081 - DNA, 25 bp, Saccharomyces pastorianus
gcaaaaacagcttccggtctatatt

SEQ ID NO: 186082 - DNA, 25 bp, Saccharomyces pastorianus
ggcaataaggttgttccacaggtta

SEQ ID NO: 186083 - DNA, 25 bp, Saccharomyces pastorianus
ggataagctgtatggtcctttacta

SEQ ID NO: 186084 - DNA, 25 bp, Saccharomyces pastorianus
atctcgataatgctgtactgtggta

SEQ ID NO: 186085 - DNA, 25 bp, Saccharomyces pastorianus
ttgagtttatttgcacctgggttat

SEQ ID NO: 186086 - DNA, 25 bp, Saccharomyces pastorianus
caatctgatccctaaataccatcca

SEQ ID NO: 186087 - DNA, 25 bp, Saccharomyces pastorianus
tatgcatccgaaccatatacctggc

SEQ ID NO: 186088 - DNA, 25 bp, Saccharomyces pastorianus
gacgttcaatcggaggacggtccaa

SEQ ID NO: 186089 - DNA, 25 bp, Saccharomyces pastorianus
tatcgttctggtcagatgcttcgac

SEQ ID NO: 186090 - DNA, 25 bp, Saccharomyces pastorianus
gttcatttcgtggtcatggcattat

SEQ ID NO: 186091 - DNA, 25 bp, Saccharomyces pastorianus
atatacctggcctgcgagtgtatca

SEQ ID NO: 186092 - DNA, 25 bp, Saccharomyces pastorianus
agttcttgtaccattacttgccagc

SEQ ID NO: 186093 - DNA, 25 bp, Saccharomyces pastorianus
acttgccagcccatttgattttgag

SEQ ID NO: 186094 - DNA, 25 bp, Saccharomyces pastorianus
atcactttggcttccgaatgtgtta

SEQ ID NO: 186095 - DNA, 25 bp, Saccharomyces pastorianus
cgaatgtgttaaatcgatcctacgt

SEQ ID NO: 186096 - DNA, 25 bp, Saccharomyces pastorianus
tatctgtcagacgatccggtactac

SEQ ID NO: 186097 - DNA, 25 bp, Saccharomyces pastorianus
gatccggtactacaaacacttatga

SEQ ID NO: 186098 - DNA, 25 bp, Saccharomyces pastorianus
acctgtactggttagcacaagcgca

SEQ ID NO: 186099 - DNA, 25 bp, Saccharomyces pastorianus
gaacgatggtatatctgtcagacga

SEQ ID NO: 186100 - DNA, 25 bp, Saccharomyces pastorianus
acagaattgcgttctaaacatgaga

SEQ ID NO: 186101 - DNA, 25 bp, Saccharomyces pastorianus
acatattttacaacctgtactggtt

SEQ ID NO: 186102 - DNA, 25 bp, Saccharomyces pastorianus
tggttagcacaagcgcaatcacttt

SEQ ID NO: 186103 - DNA, 25 bp, Saccharomyces pastorianus
aagcgcaatcactttggcttccgaa

SEQ ID NO: 186104 - DNA, 25 bp, Saccharomyces pastorianus
caaggttgttacagaattgcgttct

SEQ ID NO: 186105 - DNA, 25 bp, Saccharomyces pastorianus
cattctaggcaaggatcagtggcta

SEQ ID NO: 186106 - DNA, 25 bp, Saccharomyces pastorianus
aattcgctgcgaatggattccattc

SEQ ID NO: 186107 - DNA, 25 bp, Saccharomyces pastorianus
tcagtggctagcgaggcaatgtccc

SEQ ID NO: 186108 - DNA, 25 bp, Saccharomyces pastorianus
atccttcggccaattcgctgcgaat

SEQ ID NO: 186109 - DNA, 25 bp, Saccharomyces pastorianus
caattttctcaacagcagccataca

SEQ ID NO: 186110 - DNA, 25 bp, Saccharomyces pastorianus
acagcagccatacaatccatcgata

SEQ ID NO: 186111 - DNA, 25 bp, Saccharomyces pastorianus
atcgatatcatccttcggccaattc

SEQ ID NO: 186112 - DNA, 25 bp, Saccharomyces pastorianus
tagcgaggcaatgtcccccagtgcg

SEQ ID NO: 186113 - DNA, 25 bp, Saccharomyces pastorianus
aatggattccattctaggcaaggat

SEQ ID NO: 186114 - DNA, 25 bp, Saccharomyces pastorianus
acaatccatcgatatcatccttcgg

SEQ ID NO: 186115 - DNA, 25 bp, Saccharomyces pastorianus
attctcaattttctcaacagcagcc

SEQ ID NO: 186116 - DNA, 25 bp, Saccharomyces pastorianus
tattacccatagttgagcagctttt

SEQ ID NO: 186117 - DNA, 25 bp, Saccharomyces pastorianus
aggatttattactctctgtctcctg

SEQ ID NO: 186118 - DNA, 25 bp, Saccharomyces pastorianus
gacggtaagccaattccagagagtg

SEQ ID NO: 186119 - DNA, 25 bp, Saccharomyces pastorianus
gtttccttcacaatcgataacacag

SEQ ID NO: 186120 - DNA, 25 bp, Saccharomyces pastorianus
gcgcaacagtggcatatctcaaata

SEQ ID NO: 186121 - DNA, 25 bp, Saccharomyces pastorianus
aagccgtaacagtattgagcgcaac

SEQ ID NO: 186122 - DNA, 25 bp, Saccharomyces pastorianus
gcacgatttggtagcaagccgtaac

SEQ ID NO: 186123 - DNA, 25 bp, Saccharomyces pastorianus
aaagttctatcttccagattcagta

SEQ ID NO: 186124 - DNA, 25 bp, Saccharomyces pastorianus
atggacctttgcacgatttggtagc

SEQ ID NO: 186125 - DNA, 25 bp, Saccharomyces pastorianus
ttgagcagctttttccttctaacac

SEQ ID NO: 186126 - DNA, 25 bp, Saccharomyces pastorianus
gtgtgaccaatgatcagctactaaa

SEQ ID NO: 186127 - DNA, 25 bp, Saccharomyces pastorianus
ctaaatcagtaaatatgcacccaca

SEQ ID NO: 186128 - DNA, 25 bp, Saccharomyces pastorianus
acagttatataccatctcagcttta

SEQ ID NO: 186129 - DNA, 25 bp, Saccharomyces pastorianus
atcagtaaatatgcacccacatcat

SEQ ID NO: 186130 - DNA, 25 bp, Saccharomyces pastorianus
ttatataccatctcagctttaccct

SEQ ID NO: 186131 - DNA, 25 bp, Saccharomyces pastorianus
atctcagctttaccctgcccattct

SEQ ID NO: 186132 - DNA, 25 bp, Saccharomyces pastorianus
tatataccatctcagctttaccctg

SEQ ID NO: 186133 - DNA, 25 bp, Saccharomyces pastorianus
cagttatataccatctcagctttac

SEQ ID NO: 186134 - DNA, 25 bp, Saccharomyces pastorianus
ctacagttatataccatctcagctt

SEQ ID NO: 186135 - DNA, 25 bp, Saccharomyces pastorianus
tacagttatataccatctcagcttt

SEQ ID NO: 186136 - DNA, 25 bp, Saccharomyces pastorianus
atataccatctcagctttaccctgc

SEQ ID NO: 186137 - DNA, 25 bp, Saccharomyces pastorianus
gttatataccatctcagctttaccc

SEQ ID NO: 186138 - DNA, 25 bp, Saccharomyces pastorianus
tctagcgggatcgaaccgctgatcc

SEQ ID NO: 186139 - DNA, 25 bp, Saccharomyces pastorianus
cgaaccgctgatccccgcgttatta

SEQ ID NO: 186140 - DNA, 25 bp, Saccharomyces pastorianus
gtctctagcgggatcgaaccgctga

SEQ ID NO: 186141 - DNA, 25 bp, Saccharomyces pastorianus
atggtctctagcgggatcgaaccgc

SEQ ID NO: 186142 - DNA, 25 bp, Saccharomyces pastorianus
tctctagcgggatcgaaccgctgat

SEQ ID NO: 186143 - DNA, 25 bp, Saccharomyces pastorianus
ctctagcgggatcgaaccgctgatc

SEQ ID NO: 186144 - DNA, 25 bp, Saccharomyces pastorianus
ggtctctagcgggatcgaaccgctg

SEQ ID NO: 186145 - DNA, 25 bp, Saccharomyces pastorianus
ggatcgaaccgctgatccccgcgtt

SEQ ID NO: 186146 - DNA, 25 bp, Saccharomyces pastorianus
tagcgggatcgaaccgctgatcccc

SEQ ID NO: 186147 - DNA, 25 bp, Saccharomyces pastorianus
atcgaaccgctgatccccgcgttat

SEQ ID NO: 186148 - DNA, 25 bp, Saccharomyces pastorianus
gctgatccccgcgttattagcacgg

SEQ ID NO: 186149 - DNA, 25 bp, Saccharomyces pastorianus
catcgttcttccttttcagttcctt

SEQ ID NO: 186150 - DNA, 25 bp, Saccharomyces pastorianus
tgcctcctgttctagtttctgttta

SEQ ID NO: 186151 - DNA, 25 bp, Saccharomyces pastorianus
gtttagctttattttccttttgcag

SEQ ID NO: 186152 - DNA, 25 bp, Saccharomyces pastorianus
tgcaattgttgctttttcctctcct

SEQ ID NO: 186153 - DNA, 25 bp, Saccharomyces pastorianus
gcttatttttgttttgctctttcag

SEQ ID NO: 186154 - DNA, 25 bp, Saccharomyces pastorianus
ttttccttgaatcttgttcctcctg

SEQ ID NO: 186155 - DNA, 25 bp, Saccharomyces pastorianus
agttgtaacttctgttctttggcca

SEQ ID NO: 186156 - DNA, 25 bp, Saccharomyces pastorianus
ttttcttggcctctgcatcgttctt

SEQ ID NO: 186157 - DNA, 25 bp, Saccharomyces pastorianus
gttctttggccagttttttctgcaa

SEQ ID NO: 186158 - DNA, 25 bp, Saccharomyces pastorianus
tcttcctttcttttcaatcgcagtg

SEQ ID NO: 186159 - DNA, 25 bp, Saccharomyces pastorianus
tcagttttttcagttcttcctttct

SEQ ID NO: 186160 - DNA, 25 bp, Saccharomyces pastorianus
aatatatgcgctcgttgtacccgtt

SEQ ID NO: 186161 - DNA, 25 bp, Saccharomyces pastorianus
acgggtacgctctgcagacgatagt

SEQ ID NO: 186162 - DNA, 25 bp, Saccharomyces pastorianus
cgccccagcaagacgtacggtataa

SEQ ID NO: 186163 - DNA, 25 bp, Saccharomyces pastorianus
gtggctatcaaacatcaatcacata

SEQ ID NO: 186164 - DNA, 25 bp, Saccharomyces pastorianus
gcccaacgggaaccaaacacaggag

SEQ ID NO: 186165 - DNA, 25 bp, Saccharomyces pastorianus
tagccaattttgaaagcccaacggg

SEQ ID NO: 186166 - DNA, 25 bp, Saccharomyces pastorianus
caacacaaccggcttttcacgaatc

SEQ ID NO: 186167 - DNA, 25 bp, Saccharomyces pastorianus
acatatcatcaacacaaccggcttt

SEQ ID NO: 186168 - DNA, 25 bp, Saccharomyces pastorianus
acttagaaaccgcagtggctatcaa

SEQ ID NO: 186169 - DNA, 25 bp, Saccharomyces pastorianus
atagaagtccgccaacaaggatcat

SEQ ID NO: 186170 - DNA, 25 bp, Saccharomyces pastorianus
gacgatagtcgtagccaattttgaa

SEQ ID NO: 186171 - DNA, 25 bp, Saccharomyces pastorianus
tcacatcattatgcacggcacttgc

SEQ ID NO: 186172 - DNA, 25 bp, Saccharomyces pastorianus
tcattatgcacggcacttgcctcag

SEQ ID NO: 186173 - DNA, 25 bp, Saccharomyces pastorianus
cacatcattatgcacggcacttgcc

SEQ ID NO: 186174 - DNA, 25 bp, Saccharomyces pastorianus
actcacatcattatgcacggcactt

SEQ ID NO: 186175 - DNA, 25 bp, Saccharomyces pastorianus
acatcattatgcacggcacttgcct

SEQ ID NO: 186176 - DNA, 25 bp, Saccharomyces pastorianus
atcattatgcacggcacttgcctca

SEQ ID NO: 186177 - DNA, 25 bp, Saccharomyces pastorianus
ctcacatcattatgcacggcacttg

SEQ ID NO: 186178 - DNA, 25 bp, Saccharomyces pastorianus
cactcacatcattatgcacggcact

SEQ ID NO: 186179 - DNA, 25 bp, Saccharomyces pastorianus
catcattatgcacggcacttgcctc

SEQ ID NO: 186180 - DNA, 25 bp, Saccharomyces pastorianus
cggcaccatcgcatttaaaacttca

SEQ ID NO: 186181 - DNA, 25 bp, Saccharomyces pastorianus
gaaatagtcccttttggtgctgaat

SEQ ID NO: 186182 - DNA, 25 bp, Saccharomyces pastorianus
gtgctctaaggttgactgttccgat

SEQ ID NO: 186183 - DNA, 25 bp, Saccharomyces pastorianus
ttttgccctgtgaaatagtcccttt

SEQ ID NO: 186184 - DNA, 25 bp, Saccharomyces pastorianus
caaatgatcgccattgtcctctaaa

SEQ ID NO: 186185 - DNA, 25 bp, Saccharomyces pastorianus
aaaatcaaatccatcgcgtagcaag

SEQ ID NO: 186186 - DNA, 25 bp, Saccharomyces pastorianus
aacttagaaagcctgcagcccctta

SEQ ID NO: 186187 - DNA, 25 bp, Saccharomyces pastorianus
aacaaaaactttcccttcagctgag

SEQ ID NO: 186188 - DNA, 25 bp, Saccharomyces pastorianus
gactgttccgatattcatgcaaatg

SEQ ID NO: 186189 - DNA, 25 bp, Saccharomyces pastorianus
gaatgtccacatattgctgtcggag

SEQ ID NO: 186190 - DNA, 25 bp, Saccharomyces pastorianus
agccccttacaagcgagtcgatctg

SEQ ID NO: 186191 - DNA, 25 bp, Saccharomyces pastorianus
ttagcttcagcttcagctctggcac

SEQ ID NO: 186192 - DNA, 25 bp, Saccharomyces pastorianus
ttgttctttttcttggcggccttag

SEQ ID NO: 186193 - DNA, 25 bp, Saccharomyces pastorianus
gcttccttagccttctttttgtcag

SEQ ID NO: 186194 - DNA, 25 bp, Saccharomyces pastorianus
agattcagctttagccttggcttca

SEQ ID NO: 186195 - DNA, 25 bp, Saccharomyces pastorianus
gttagccttggcttcagattcagct

SEQ ID NO: 186196 - DNA, 25 bp, Saccharomyces pastorianus
gacagctctttcaacaagtttgacc

SEQ ID NO: 186197 - DNA, 25 bp, Saccharomyces pastorianus
gtttgaccaatctagcgttatcagc

SEQ ID NO: 186198 - DNA, 25 bp, Saccharomyces pastorianus
ttggcggccttagcagcttccttag

SEQ ID NO: 186199 - DNA, 25 bp, Saccharomyces pastorianus
ggatcttcactgacagctctttcaa

SEQ ID NO: 186200 - DNA, 25 bp, Saccharomyces pastorianus
ttttgtcagcttttgcggaggcgtt

SEQ ID NO: 186201 - DNA, 25 bp, Saccharomyces pastorianus
tcttctcttcttctttgaacatttt

SEQ ID NO: 186202 - DNA, 25 bp, Saccharomyces pastorianus
ggtatatatcaatcgttggcaggtc

SEQ ID NO: 186203 - DNA, 25 bp, Saccharomyces pastorianus
gaatcccattggctttgaaggatgt

SEQ ID NO: 186204 - DNA, 25 bp, Saccharomyces pastorianus
agggtaaatctccaattagcggcat

SEQ ID NO: 186205 - DNA, 25 bp, Saccharomyces pastorianus
ggatgttagttaccttgtcgaagag

SEQ ID NO: 186206 - DNA, 25 bp, Saccharomyces pastorianus
gatgtttatgatgccaaagttctaa

SEQ ID NO: 186207 - DNA, 25 bp, Saccharomyces pastorianus
tatccgataaacctctagaacctgt

SEQ ID NO: 186208 - DNA, 25 bp, Saccharomyces pastorianus
aagtgcacgaagaccgtgtcttgaa

SEQ ID NO: 186209 - DNA, 25 bp, Saccharomyces pastorianus
gtataccgagccaaagaatcccatt

SEQ ID NO: 186210 - DNA, 25 bp, Saccharomyces pastorianus
aatcgttggcaggtcaaatgagcag

SEQ ID NO: 186211 - DNA, 25 bp, Saccharomyces pastorianus
ggattgaccatcactacgtggattt

SEQ ID NO: 186212 - DNA, 25 bp, Saccharomyces pastorianus
ctctttgcaaaatgtggtagtacta

SEQ ID NO: 186213 - DNA, 25 bp, Saccharomyces pastorianus
cgggttcaacacaatcttttccaag

SEQ ID NO: 186214 - DNA, 25 bp, Saccharomyces pastorianus
tggatccccttaactttagtactct

SEQ ID NO: 186215 - DNA, 25 bp, Saccharomyces pastorianus
tagtactcttattatgtttcacatt

SEQ ID NO: 186216 - DNA, 25 bp, Saccharomyces pastorianus
aattctgcccaaatgaccgtggatg

SEQ ID NO: 186217 - DNA, 25 bp, Saccharomyces pastorianus
ggagattgggccagataattctgcc

SEQ ID NO: 186218 - DNA, 25 bp, Saccharomyces pastorianus
aactgggaacttggtagcaaatctg

SEQ ID NO: 186219 - DNA, 25 bp, Saccharomyces pastorianus
cgtttaaatgacgagctcccaaagt

SEQ ID NO: 186220 - DNA, 25 bp, Saccharomyces pastorianus
gtggatgattctcaaacttcttctg

SEQ ID NO: 186221 - DNA, 25 bp, Saccharomyces pastorianus
ttggtttagccaaggtactactagg

SEQ ID NO: 186222 - DNA, 25 bp, Saccharomyces pastorianus
gaagctttacaggtcgggttcaaca

SEQ ID NO: 186223 - DNA, 25 bp, Saccharomyces pastorianus
gacgagctcccaaagtatgaagact

SEQ ID NO: 186224 - DNA, 25 bp, Saccharomyces pastorianus
gagattgaacaacagattaggaaac

SEQ ID NO: 186225 - DNA, 25 bp, Saccharomyces pastorianus
ttttaaaggatcagcaagtcaaggg

SEQ ID NO: 186226 - DNA, 25 bp, Saccharomyces pastorianus
gtcccgagaggatttatgaatcgtt

SEQ ID NO: 186227 - DNA, 25 bp, Saccharomyces pastorianus
aacaacagtcgtttgatgatcctac

SEQ ID NO: 186228 - DNA, 25 bp, Saccharomyces pastorianus
gttcagcaatcaacggctctaatgc

SEQ ID NO: 186229 - DNA, 25 bp, Saccharomyces pastorianus
aacagtcgtttgatgatcctacgaa

SEQ ID NO: 186230 - DNA, 25 bp, Saccharomyces pastorianus
gatgatgggcccaaatttttaaagg

SEQ ID NO: 186231 - DNA, 25 bp, Saccharomyces pastorianus
ggctctaatgcaatacgagatcata

SEQ ID NO: 186232 - DNA, 25 bp, Saccharomyces pastorianus
tgcctaaaattacaaaagtcccgag

SEQ ID NO: 186233 - DNA, 25 bp, Saccharomyces pastorianus
gaatcgttcagcaatcaacggctct

SEQ ID NO: 186234 - DNA, 25 bp, Saccharomyces pastorianus
aatcaacggctctaatgcaatacga

SEQ ID NO: 186235 - DNA, 25 bp, Saccharomyces pastorianus
acagcctccatgtcggttgctgcgt

SEQ ID NO: 186236 - DNA, 25 bp, Saccharomyces pastorianus
atgtcggttgctgcgttaccgtcta

SEQ ID NO: 186237 - DNA, 25 bp, Saccharomyces pastorianus
atgaggacagcaacgcgggcgttca

SEQ ID NO: 186238 - DNA, 25 bp, Saccharomyces pastorianus
ccgtctagttcccaggagagaaata

SEQ ID NO: 186239 - DNA, 25 bp, Saccharomyces pastorianus
ctgcgttaccgtctagttcccagga

SEQ ID NO: 186240 - DNA, 25 bp, Saccharomyces pastorianus
agaaaatcaggccacagcctccatg

SEQ ID NO: 186241 - DNA, 25 bp, Saccharomyces pastorianus
agcaacgcgggcgttcatgttagta

SEQ ID NO: 186242 - DNA, 25 bp, Saccharomyces pastorianus
ttaccgtctagttcccaggagagaa

SEQ ID NO: 186243 - DNA, 25 bp, Saccharomyces pastorianus
ggttgctgcgttaccgtctagttcc

SEQ ID NO: 186244 - DNA, 25 bp, Saccharomyces pastorianus
gttcccaggagagaaatagcagtga

SEQ ID NO: 186245 - DNA, 25 bp, Saccharomyces pastorianus
ttggcagaaaatcaggccacagcct

SEQ ID NO: 186246 - DNA, 25 bp, Saccharomyces pastorianus
agccgtccagttggcaatggcaaat

SEQ ID NO: 186247 - DNA, 25 bp, Saccharomyces pastorianus
agattggctgggtcggatacactga

SEQ ID NO: 186248 - DNA, 25 bp, Saccharomyces pastorianus
gaatactacagtttctcctttcatt

SEQ ID NO: 186249 - DNA, 25 bp, Saccharomyces pastorianus
aataggctgtacaggctccgacgga

SEQ ID NO: 186250 - DNA, 25 bp, Saccharomyces pastorianus
aaaggctcgcatcccatatcaaaaa

SEQ ID NO: 186251 - DNA, 25 bp, Saccharomyces pastorianus
aagttctgatagattctcgtgacat

SEQ ID NO: 186252 - DNA, 25 bp, Saccharomyces pastorianus
gtggcttcccaccaaatgtgctgta

SEQ ID NO: 186253 - DNA, 25 bp, Saccharomyces pastorianus
gaatcgtttaagcaagccgtccagt

SEQ ID NO: 186254 - DNA, 25 bp, Saccharomyces pastorianus
aattgctgtcgcaagcatcgatggc

SEQ ID NO: 186255 - DNA, 25 bp, Saccharomyces pastorianus
cgacggaacctcgaattgtggcttc

SEQ ID NO: 186256 - DNA, 25 bp, Saccharomyces pastorianus
atgtgctgtactgtcagcctcagat

SEQ ID NO: 186257 - DNA, 25 bp, Saccharomyces pastorianus
gatctcgctatttagaaccatttgg

SEQ ID NO: 186258 - DNA, 25 bp, Saccharomyces pastorianus
acccaattcggtatcccgtgatatg

SEQ ID NO: 186259 - DNA, 25 bp, Saccharomyces pastorianus
ggcaagatgttctagcgttacaatt

SEQ ID NO: 186260 - DNA, 25 bp, Saccharomyces pastorianus
tgtcccaggtggtatcaagtttgaa

SEQ ID NO: 186261 - DNA, 25 bp, Saccharomyces pastorianus
attggcttggatgtctacgtttttc

SEQ ID NO: 186262 - DNA, 25 bp, Saccharomyces pastorianus
tacgtttttccctacagagttactg

SEQ ID NO: 186263 - DNA, 25 bp, Saccharomyces pastorianus
tgtcatcgatgtgctacccaattcg

SEQ ID NO: 186264 - DNA, 25 bp, Saccharomyces pastorianus
gcaagctgctatcttcaaagtcggt

SEQ ID NO: 186265 - DNA, 25 bp, Saccharomyces pastorianus
caaaggcgccttttatggcgacctt

SEQ ID NO: 186266 - DNA, 25 bp, Saccharomyces pastorianus
tcaatctcacgcaaaggcgcctttt

SEQ ID NO: 186267 - DNA, 25 bp, Saccharomyces pastorianus
agagttactgcgacggcaccgggtt

SEQ ID NO: 186268 - DNA, 25 bp, Saccharomyces pastorianus
acaggagcatgatacttcgtccagc

SEQ ID NO: 186269 - DNA, 25 bp, Saccharomyces pastorianus
tataccaggtagtatagacactggc

SEQ ID NO: 186270 - DNA, 25 bp, Saccharomyces pastorianus
attcacaggagcatgatacttcgtc

SEQ ID NO: 186271 - DNA, 25 bp, Saccharomyces pastorianus
gattctcattcacaggagcatgata

SEQ ID NO: 186272 - DNA, 25 bp, Saccharomyces pastorianus
aatatatgacctatttcccaataag

SEQ ID NO: 186273 - DNA, 25 bp, Saccharomyces pastorianus
tgacctatttcccaataagcataat

SEQ ID NO: 186274 - DNA, 25 bp, Saccharomyces pastorianus
acagattctcattcacaggagcatg

SEQ ID NO: 186275 - DNA, 25 bp, Saccharomyces pastorianus
atatgacctatttcccaataagcat

SEQ ID NO: 186276 - DNA, 25 bp, Saccharomyces pastorianus
tttcccaataagcataatatccaat

SEQ ID NO: 186277 - DNA, 25 bp, Saccharomyces pastorianus
tagtatagacactggcattttaaag

SEQ ID NO: 186278 - DNA, 25 bp, Saccharomyces pastorianus
ggtagtatagacactggcattttaa

SEQ ID NO: 186279 - DNA, 25 bp, Saccharomyces pastorianus
gcgcaatttagatcggattttcctg

SEQ ID NO: 186280 - DNA, 25 bp, Saccharomyces pastorianus
gagtttcttctgtccaattctaaaa

SEQ ID NO: 186281 - DNA, 25 bp, Saccharomyces pastorianus
aggacttattcagtcggcacgttaa

SEQ ID NO: 186282 - DNA, 25 bp, Saccharomyces pastorianus
ggcacgttaagacttttattcctct

SEQ ID NO: 186283 - DNA, 25 bp, Saccharomyces pastorianus
gatgatattgagtttcttctgtcca

SEQ ID NO: 186284 - DNA, 25 bp, Saccharomyces pastorianus
ttatcactctgggaaatgcatggta

SEQ ID NO: 186285 - DNA, 25 bp, Saccharomyces pastorianus
gacaatactacggtaccaatcaatg

SEQ ID NO: 186286 - DNA, 25 bp, Saccharomyces pastorianus
atttcccgccaagctttgacaattt

SEQ ID NO: 186287 - DNA, 25 bp, Saccharomyces pastorianus
attaagcttagttttgcgcaattta

SEQ ID NO: 186288 - DNA, 25 bp, Saccharomyces pastorianus
aaactctcacacctaaatttcgaag

SEQ ID NO: 186289 - DNA, 25 bp, Saccharomyces pastorianus
gaatctccatccttgcttcaaataa

SEQ ID NO: 186290 - DNA, 25 bp, Saccharomyces pastorianus
agaaatactaatgccggctttcaaa

SEQ ID NO: 186291 - DNA, 25 bp, Saccharomyces pastorianus
tctgttattgagttggatccaccat

SEQ ID NO: 186292 - DNA, 25 bp, Saccharomyces pastorianus
agtagtgggagattccgcattcaaa

SEQ ID NO: 186293 - DNA, 25 bp, Saccharomyces pastorianus
atatccagccgtatcatccgatggg

SEQ ID NO: 186294 - DNA, 25 bp, Saccharomyces pastorianus
ggatccaccatttgctgttgaagac

SEQ ID NO: 186295 - DNA, 25 bp, Saccharomyces pastorianus
tcatgtgagggcttacgcaacgcat

SEQ ID NO: 186296 - DNA, 25 bp, Saccharomyces pastorianus
tagagttggtcgtacagcaagggcc

SEQ ID NO: 186297 - DNA, 25 bp, Saccharomyces pastorianus
agtgggataccaatgctacgacatg

SEQ ID NO: 186298 - DNA, 25 bp, Saccharomyces pastorianus
acgcaacgcatatctctcaagaaaa

SEQ ID NO: 186299 - DNA, 25 bp, Saccharomyces pastorianus
gtgaagttcttacatctaggccatt

SEQ ID NO: 186300 - DNA, 25 bp, Saccharomyces pastorianus
ggccgttaaaggtttcattagtcat

SEQ ID NO: 186301 - DNA, 25 bp, Saccharomyces pastorianus
cagaggtgcagttaccaacttggcc

SEQ ID NO: 186302 - DNA, 25 bp, Saccharomyces pastorianus
taaacgttgcccattgaagtacaca

SEQ ID NO: 186303 - DNA, 25 bp, Saccharomyces pastorianus
aaaactggtctcaaggtgaatccaa

SEQ ID NO: 186304 - DNA, 25 bp, Saccharomyces pastorianus
aggttaacggtgttccagctgagct

SEQ ID NO: 186305 - DNA, 25 bp, Saccharomyces pastorianus
cttggccaacttgtttgttcaaaat

SEQ ID NO: 186306 - DNA, 25 bp, Saccharomyces pastorianus
gttcttcctacgtatctggtggtaa

SEQ ID NO: 186307 - DNA, 25 bp, Saccharomyces pastorianus
gaagctaatgcgtacttaatcaaca

SEQ ID NO: 186308 - DNA, 25 bp, Saccharomyces pastorianus
agctgagctcttgaatcctgctaaa

SEQ ID NO: 186309 - DNA, 25 bp, Saccharomyces pastorianus
tcaatcttcaagtacctaccaaggt

SEQ ID NO: 186310 - DNA, 25 bp, Saccharomyces pastorianus
agggccattctggattctattcatg

SEQ ID NO: 186311 - DNA, 25 bp, Saccharomyces pastorianus
ctattcatgatggttcgttagccaa

SEQ ID NO: 186312 - DNA, 25 bp, Saccharomyces pastorianus
gttacttccttggagattaccgatt

SEQ ID NO: 186313 - DNA, 25 bp, Saccharomyces pastorianus
aatcaagttcttttggcttcggcag

SEQ ID NO: 186314 - DNA, 25 bp, Saccharomyces pastorianus
aacggtaagttatttgctaatcaag

SEQ ID NO: 186315 - DNA, 25 bp, Saccharomyces pastorianus
attaccgattcctttctgttgttca

SEQ ID NO: 186316 - DNA, 25 bp, Saccharomyces pastorianus
gttcaccacggcacaacacaattta

SEQ ID NO: 186317 - DNA, 25 bp, Saccharomyces pastorianus
ctgagttagttgcatttggtatcac

SEQ ID NO: 186318 - DNA, 25 bp, Saccharomyces pastorianus
gattcctttctgttgttcaccacgg

SEQ ID NO: 186319 - DNA, 25 bp, Saccharomyces pastorianus
aaaagagtccataacacatcagcag

SEQ ID NO: 186320 - DNA, 25 bp, Saccharomyces pastorianus
gcttcggcagttacttccttggaga

SEQ ID NO: 186321 - DNA, 25 bp, Saccharomyces pastorianus
tgtgcatttaaattccaccgatttc

SEQ ID NO: 186322 - DNA, 25 bp, Saccharomyces pastorianus
caactggtctgcagaaagttctgag

SEQ ID NO: 186323 - DNA, 25 bp, Saccharomyces pastorianus
gccattctggttgcccgatttagaa

SEQ ID NO: 186324 - DNA, 25 bp, Saccharomyces pastorianus
gaaccctgagaattggcaccgtgac

SEQ ID NO: 186325 - DNA, 25 bp, Saccharomyces pastorianus
ttctttgtacttgcaaggtgtggct

SEQ ID NO: 186326 - DNA, 25 bp, Saccharomyces pastorianus
aaataggcccattaggaaccctgag

SEQ ID NO: 186327 - DNA, 25 bp, Saccharomyces pastorianus
tcgaagttcccctattctgtaatgg

SEQ ID NO: 186328 - DNA, 25 bp, Saccharomyces pastorianus
caccgtgacgatattgattccaata

SEQ ID NO: 186329 - DNA, 25 bp, Saccharomyces pastorianus
gcaggagaatattcgaagttcccct

SEQ ID NO: 186330 - DNA, 25 bp, Saccharomyces pastorianus
aacattttgccattctggttgcccg

SEQ ID NO: 186331 - DNA, 25 bp, Saccharomyces pastorianus
gacatcagaaagaaccctcaggagg

SEQ ID NO: 186332 - DNA, 25 bp, Saccharomyces pastorianus
caaggtgtggcttcactgtttggtg

SEQ ID NO: 186333 - DNA, 25 bp, Saccharomyces pastorianus
gattccaatattcccaacccattga

SEQ ID NO: 186334 - DNA, 25 bp, Saccharomyces pastorianus
tgccttattaaaaatggaatcccaa

SEQ ID NO: 186335 - DNA, 25 bp, Saccharomyces pastorianus
tattgccttattaaaaatggaatcc

SEQ ID NO: 186336 - DNA, 25 bp, Saccharomyces pastorianus
ttgtgtagaattgcagattcccttt

SEQ ID NO: 186337 - DNA, 25 bp, Saccharomyces pastorianus
tctagtacattctacatacctaata

SEQ ID NO: 186338 - DNA, 25 bp, Saccharomyces pastorianus
aacttctagtacattctacatacct

SEQ ID NO: 186339 - DNA, 25 bp, Saccharomyces pastorianus
tatggattcctaaatcctggaggag

SEQ ID NO: 186340 - DNA, 25 bp, Saccharomyces pastorianus
ctagtacattctacatacctaatat

SEQ ID NO: 186341 - DNA, 25 bp, Saccharomyces pastorianus
ttgccttattaaaaatggaatccca

SEQ ID NO: 186342 - DNA, 25 bp, Saccharomyces pastorianus
gcccattgagacagacttgcaggat

SEQ ID NO: 186343 - DNA, 25 bp, Saccharomyces pastorianus
gccttctacaccatatggaactacc

SEQ ID NO: 186344 - DNA, 25 bp, Saccharomyces pastorianus
actgtgcaggattatgtataccgag

SEQ ID NO: 186345 - DNA, 25 bp, Saccharomyces pastorianus
taacgaactgtcacccagggcacta

SEQ ID NO: 186346 - DNA, 25 bp, Saccharomyces pastorianus
gtacgattattcagacgttaaacct

SEQ ID NO: 186347 - DNA, 25 bp, Saccharomyces pastorianus
agggctctgatcagccttaacgaac

SEQ ID NO: 186348 - DNA, 25 bp, Saccharomyces pastorianus
gctaacagccgaaattatcgacgtg

SEQ ID NO: 186349 - DNA, 25 bp, Saccharomyces pastorianus
ggattataagcggttgatgggactc

SEQ ID NO: 186350 - DNA, 25 bp, Saccharomyces pastorianus
ggaactaccgattcaatatcgtcag

SEQ ID NO: 186351 - DNA, 25 bp, Saccharomyces pastorianus
agggcactacagctaacagccgaaa

SEQ ID NO: 186352 - DNA, 25 bp, Saccharomyces pastorianus
cgttaaacctttgcccattgagaca

SEQ ID NO: 186353 - DNA, 25 bp, Saccharomyces pastorianus
aaggtatcggcctgagcgctgatga

SEQ ID NO: 186354 - DNA, 25 bp, Saccharomyces pastorianus
gatgccccttccgtgattggagtca

SEQ ID NO: 186355 - DNA, 25 bp, Saccharomyces pastorianus
ggactgtcacactattctttccaag

SEQ ID NO: 186356 - DNA, 25 bp, Saccharomyces pastorianus
gaaatgacacacaactctgcatcag

SEQ ID NO: 186357 - DNA, 25 bp, Saccharomyces pastorianus
ttgacccaagcgcagatcatcagtg

SEQ ID NO: 186358 - DNA, 25 bp, Saccharomyces pastorianus
aattgcgctctatgaagttgaccca

SEQ ID NO: 186359 - DNA, 25 bp, Saccharomyces pastorianus
gagcaaacgcatatcgcgcatccta

SEQ ID NO: 186360 - DNA, 25 bp, Saccharomyces pastorianus
cgcatcctaacctatacttcgaaag

SEQ ID NO: 186361 - DNA, 25 bp, Saccharomyces pastorianus
cggagattatcatggatgccccttc

SEQ ID NO: 186362 - DNA, 25 bp, Saccharomyces pastorianus
tcatcagtgttctggattcctgcca

SEQ ID NO: 186363 - DNA, 25 bp, Saccharomyces pastorianus
gaataccgttacagcttcaggcata

SEQ ID NO: 186364 - DNA, 25 bp, Saccharomyces pastorianus
cctcattaagtggagtgatcagtta

SEQ ID NO: 186365 - DNA, 25 bp, Saccharomyces pastorianus
gagacaatcttcactcaatgaattt

SEQ ID NO: 186366 - DNA, 25 bp, Saccharomyces pastorianus
accgatatcgaaatgctgttgagtg

SEQ ID NO: 186367 - DNA, 25 bp, Saccharomyces pastorianus
taatggagtcgaagacagcagcaaa

SEQ ID NO: 186368 - DNA, 25 bp, Saccharomyces pastorianus
gacagcagcaaaatgagacaatctt

SEQ ID NO: 186369 - DNA, 25 bp, Saccharomyces pastorianus
acgtattcgtatgtgctgcattcct

SEQ ID NO: 186370 - DNA, 25 bp, Saccharomyces pastorianus
gttgagtgaggcctttatttggcaa

SEQ ID NO: 186371 - DNA, 25 bp, Saccharomyces pastorianus
aatccacccacaaaagactggactg

SEQ ID NO: 186372 - DNA, 25 bp, Saccharomyces pastorianus
cactcaatgaatttcacgtattcgt

SEQ ID NO: 186373 - DNA, 25 bp, Saccharomyces pastorianus
aatgctgttgagtgaggcctttatt

SEQ ID NO: 186374 - DNA, 25 bp, Saccharomyces pastorianus
aagactggactgaaaccgatatcga

SEQ ID NO: 186375 - DNA, 25 bp, Saccharomyces pastorianus
attacgatctcgaacttgcaatccc

SEQ ID NO: 186376 - DNA, 25 bp, Saccharomyces pastorianus
tttcacccttcatttacgactctaa

SEQ ID NO: 186377 - DNA, 25 bp, Saccharomyces pastorianus
taaaaaactaccttctcggtgcacg

SEQ ID NO: 186378 - DNA, 25 bp, Saccharomyces pastorianus
tctacgactgggttcatatgacgat

SEQ ID NO: 186379 - DNA, 25 bp, Saccharomyces pastorianus
gaagttgtcgcttaagtttccatat

SEQ ID NO: 186380 - DNA, 25 bp, Saccharomyces pastorianus
tattatgtttccaggtttcaccctt

SEQ ID NO: 186381 - DNA, 25 bp, Saccharomyces pastorianus
aggctcctttggcagagaagtgtca

SEQ ID NO: 186382 - DNA, 25 bp, Saccharomyces pastorianus
aaccgtgagttgtacattgagcttg

SEQ ID NO: 186383 - DNA, 25 bp, Saccharomyces pastorianus
attcttccaggttcgtttactagca

SEQ ID NO: 186384 - DNA, 25 bp, Saccharomyces pastorianus
tatagttctgtccatgcaatcatca

SEQ ID NO: 186385 - DNA, 25 bp, Saccharomyces pastorianus
gatggcattgcgcatttctttaaaa

SEQ ID NO: 186386 - DNA, 25 bp, Saccharomyces pastorianus
tcacatcacgttctcaccgtggaga

SEQ ID NO: 186387 - DNA, 25 bp, Saccharomyces pastorianus
ggctatcacatcacgttctcaccgt

SEQ ID NO: 186388 - DNA, 25 bp, Saccharomyces pastorianus
gtgtaacggctatcacatcacgttc

SEQ ID NO: 186389 - DNA, 25 bp, Saccharomyces pastorianus
tatcacatcacgttctcaccgtgga

SEQ ID NO: 186390 - DNA, 25 bp, Saccharomyces pastorianus
atcacgttctcaccgtggagaccgg

SEQ ID NO: 186391 - DNA, 25 bp, Saccharomyces pastorianus
acatcacgttctcaccgtggagacc

SEQ ID NO: 186392 - DNA, 25 bp, Saccharomyces pastorianus
aatccgatgtagtgtaacggctatc

SEQ ID NO: 186393 - DNA, 25 bp, Saccharomyces pastorianus
gtagtgtaacggctatcacatcacg

SEQ ID NO: 186394 - DNA, 25 bp, Saccharomyces pastorianus
taacggctatcacatcacgttctca

SEQ ID NO: 186395 - DNA, 25 bp, Saccharomyces pastorianus
taatccgatgtagtgtaacggctat

SEQ ID NO: 186396 - DNA, 25 bp, Saccharomyces pastorianus
ttaatccgatgtagtgtaacggcta

SEQ ID NO: 186397 - DNA, 25 bp, Saccharomyces pastorianus
ttttcgcgtgcctgtgatgcttcca

SEQ ID NO: 186398 - DNA, 25 bp, Saccharomyces pastorianus
tattgtctaagcctttattcggtgt

SEQ ID NO: 186399 - DNA, 25 bp, Saccharomyces pastorianus
attgaaccctcattcagaagcttat

SEQ ID NO: 186400 - DNA, 25 bp, Saccharomyces pastorianus
agaacgtctgaattgaaccctcatt

SEQ ID NO: 186401 - DNA, 25 bp, Saccharomyces pastorianus
ttttctaaacgatctccatggaaga

SEQ ID NO: 186402 - DNA, 25 bp, Saccharomyces pastorianus
tctaagcctttattcggtgttttct

SEQ ID NO: 186403 - DNA, 25 bp, Saccharomyces pastorianus
tgccgagatgtgccttgaaaaaacc

SEQ ID NO: 186404 - DNA, 25 bp, Saccharomyces pastorianus
gcctgtgatgcttccattttggtca

SEQ ID NO: 186405 - DNA, 25 bp, Saccharomyces pastorianus
ttcggtgttttctaaacgatctcca

SEQ ID NO: 186406 - DNA, 25 bp, Saccharomyces pastorianus
gtgttttctaaacgatctccatgga

SEQ ID NO: 186407 - DNA, 25 bp, Saccharomyces pastorianus
gaattgaaccctcattcagaagctt

SEQ ID NO: 186408 - DNA, 25 bp, Saccharomyces pastorianus
ctttgatagacttcgtatgtggagt

SEQ ID NO: 186409 - DNA, 25 bp, Saccharomyces pastorianus
tcatacatctttgatagacttcgta

SEQ ID NO: 186410 - DNA, 25 bp, Saccharomyces pastorianus
ctgttttatggcgcttatgtgtatt

SEQ ID NO: 186411 - DNA, 25 bp, Saccharomyces pastorianus
catctttgatagacttcgtatgtgg

SEQ ID NO: 186412 - DNA, 25 bp, Saccharomyces pastorianus
tactgttttatggcgcttatgtgta

SEQ ID NO: 186413 - DNA, 25 bp, Saccharomyces pastorianus
actgttttatggcgcttatgtgtat

SEQ ID NO: 186414 - DNA, 25 bp, Saccharomyces pastorianus
acatctttgatagacttcgtatgtg

SEQ ID NO: 186415 - DNA, 25 bp, Saccharomyces pastorianus
tctttgatagacttcgtatgtggag

SEQ ID NO: 186416 - DNA, 25 bp, Saccharomyces pastorianus
gtactgttttatggcgcttatgtgt

SEQ ID NO: 186417 - DNA, 25 bp, Saccharomyces pastorianus
atacatctttgatagacttcgtatg

SEQ ID NO: 186418 - DNA, 25 bp, Saccharomyces pastorianus
atctttgatagacttcgtatgtgga

SEQ ID NO: 186419 - DNA, 25 bp, Saccharomyces pastorianus
ttatcactgaaggtacctttccctc

SEQ ID NO: 186420 - DNA, 25 bp, Saccharomyces pastorianus
ggtaacaatgaacttctacaccgtg

SEQ ID NO: 186421 - DNA, 25 bp, Saccharomyces pastorianus
gaccaagattttcaaggctattcat

SEQ ID NO: 186422 - DNA, 25 bp, Saccharomyces pastorianus
gactccgcttctgacaacgtgtata

SEQ ID NO: 186423 - DNA, 25 bp, Saccharomyces pastorianus
cccttgctagggatggtttgcgtta

SEQ ID NO: 186424 - DNA, 25 bp, Saccharomyces pastorianus
gaatgagagcccaacatccaggtaa

SEQ ID NO: 186425 - DNA, 25 bp, Saccharomyces pastorianus
ctgggccgttgaatactacgctcaa

SEQ ID NO: 186426 - DNA, 25 bp, Saccharomyces pastorianus
ggttacgacaatgctccaggtatct

SEQ ID NO: 186427 - DNA, 25 bp, Saccharomyces pastorianus
tattccaaacagagactgggccgtt

SEQ ID NO: 186428 - DNA, 25 bp, Saccharomyces pastorianus
aaatcgttcgcatgggtccaattat

SEQ ID NO: 186429 - DNA, 25 bp, Saccharomyces pastorianus
acgtgctcaaagaccaggaaccttg

SEQ ID NO: 186430 - DNA, 25 bp, Saccharomyces pastorianus
gtactttcgcatctgcttttaacgc

SEQ ID NO: 186431 - DNA, 25 bp, Saccharomyces pastorianus
atggtggcctgatgtttttctttat

SEQ ID NO: 186432 - DNA, 25 bp, Saccharomyces pastorianus
aggcaccgccagttttcgaaatttg

SEQ ID NO: 186433 - DNA, 25 bp, Saccharomyces pastorianus
ggattgaatctttcctttttgcgat

SEQ ID NO: 186434 - DNA, 25 bp, Saccharomyces pastorianus
gtgatattctcctctttattttcag

SEQ ID NO: 186435 - DNA, 25 bp, Saccharomyces pastorianus
aaaacttcgacgtcttggccaatgt

SEQ ID NO: 186436 - DNA, 25 bp, Saccharomyces pastorianus
tgatatttttcactgctacagcagg

SEQ ID NO: 186437 - DNA, 25 bp, Saccharomyces pastorianus
agaggtgttccttatgtttcagtga

SEQ ID NO: 186438 - DNA, 25 bp, Saccharomyces pastorianus
atcctcgttatttagttgttcaaga

SEQ ID NO: 186439 - DNA, 25 bp, Saccharomyces pastorianus
aggttctcggaacgtcaaagattca

SEQ ID NO: 186440 - DNA, 25 bp, Saccharomyces pastorianus
gaactttgggctatgtactttcgca

SEQ ID NO: 186441 - DNA, 25 bp, Saccharomyces pastorianus
cgatattactcaattgatcaggtca

SEQ ID NO: 186442 - DNA, 25 bp, Saccharomyces pastorianus
gaaggagatttttatcctcccgtgg

SEQ ID NO: 186443 - DNA, 25 bp, Saccharomyces pastorianus
aaacacaactgagagagcccttaat

SEQ ID NO: 186444 - DNA, 25 bp, Saccharomyces pastorianus
tggtggattaaaacctctcagaaat

SEQ ID NO: 186445 - DNA, 25 bp, Saccharomyces pastorianus
gaatttgctttatagagaacctgaa

SEQ ID NO: 186446 - DNA, 25 bp, Saccharomyces pastorianus
gaacggaatgatcccataaccaaaa

SEQ ID NO: 186447 - DNA, 25 bp, Saccharomyces pastorianus
gaccaatgtatgtgaacgtcataaa

SEQ ID NO: 186448 - DNA, 25 bp, Saccharomyces pastorianus
caaactgtttcctgtaaagtacgat

SEQ ID NO: 186449 - DNA, 25 bp, Saccharomyces pastorianus
tcctcccgtggtataaagaatttgc

SEQ ID NO: 186450 - DNA, 25 bp, Saccharomyces pastorianus
tgaagactggatcaaaacacaactg

SEQ ID NO: 186451 - DNA, 25 bp, Saccharomyces pastorianus
gagagcccttaataatgaccaatgt

SEQ ID NO: 186452 - DNA, 25 bp, Saccharomyces pastorianus
tacagtggaagaaaccgaggaagat

SEQ ID NO: 186453 - DNA, 25 bp, Saccharomyces pastorianus
aagatacagtggaagacgccgagga

SEQ ID NO: 186454 - DNA, 25 bp, Saccharomyces pastorianus
gtgttttagatgaagtagcggtcga

SEQ ID NO: 186455 - DNA, 25 bp, Saccharomyces pastorianus
tttagatgaagtagcggtcgaagaa

SEQ ID NO: 186456 - DNA, 25 bp, Saccharomyces pastorianus
aagcaagtgttttagatgaagtagc

SEQ ID NO: 186457 - DNA, 25 bp, Saccharomyces pastorianus
agacgccgaggaagatacagtggaa

SEQ ID NO: 186458 - DNA, 25 bp, Saccharomyces pastorianus
agacgccgaggaagatacagtagaa

SEQ ID NO: 186459 - DNA, 25 bp, Saccharomyces pastorianus
gaagaagatacagtggaagaaaccg

SEQ ID NO: 186460 - DNA, 25 bp, Saccharomyces pastorianus
aactagatgtggtggctgatgagga

SEQ ID NO: 186461 - DNA, 25 bp, Saccharomyces pastorianus
tggctgatgaggaagcaagtgtttt

SEQ ID NO: 186462 - DNA, 25 bp, Saccharomyces pastorianus
tagcggtcgaagaagatggagatgt

SEQ ID NO: 186463 - DNA, 25 bp, Saccharomyces pastorianus
tgcctccaacttgcatggtcgaatt

SEQ ID NO: 186464 - DNA, 25 bp, Saccharomyces pastorianus
gagcactattacaatcggctggata

SEQ ID NO: 186465 - DNA, 25 bp, Saccharomyces pastorianus
gtatctactcgtagcactctcatag

SEQ ID NO: 186466 - DNA, 25 bp, Saccharomyces pastorianus
ctttgcagataatttcggccgttta

SEQ ID NO: 186467 - DNA, 25 bp, Saccharomyces pastorianus
agtgcagtgactgtattcgccctat

SEQ ID NO: 186468 - DNA, 25 bp, Saccharomyces pastorianus
tatacggtgtggtatctggtccaat

SEQ ID NO: 186469 - DNA, 25 bp, Saccharomyces pastorianus
gattcctggttattatatgtcctca

SEQ ID NO: 186470 - DNA, 25 bp, Saccharomyces pastorianus
tagctttagcccctctaacgagata

SEQ ID NO: 186471 - DNA, 25 bp, Saccharomyces pastorianus
ttcgccctatggttagtatctactc

SEQ ID NO: 186472 - DNA, 25 bp, Saccharomyces pastorianus
ataaccacatttgtctgtcttctcc

SEQ ID NO: 186473 - DNA, 25 bp, Saccharomyces pastorianus
aaactttgggcttcagctctaacga

SEQ ID NO: 186474 - DNA, 25 bp, Saccharomyces pastorianus
agaccagccatctctagtgctttgt

SEQ ID NO: 186475 - DNA, 25 bp, Saccharomyces pastorianus
accagccatctctagtgctttgtcc

SEQ ID NO: 186476 - DNA, 25 bp, Saccharomyces pastorianus
catggtactctaccagattgagacc

SEQ ID NO: 186477 - DNA, 25 bp, Saccharomyces pastorianus
gagaccagccatctctagtgctttg

SEQ ID NO: 186478 - DNA, 25 bp, Saccharomyces pastorianus
ccatggtactctaccagattgagac

SEQ ID NO: 186479 - DNA, 25 bp, Saccharomyces pastorianus
gtactctaccagattgagaccagcc

SEQ ID NO: 186480 - DNA, 25 bp, Saccharomyces pastorianus
gaccagccatctctagtgctttgtc

SEQ ID NO: 186481 - DNA, 25 bp, Saccharomyces pastorianus
tactctaccagattgagaccagcca

SEQ ID NO: 186482 - DNA, 25 bp, Saccharomyces pastorianus
atggtactctaccagattgagacca

SEQ ID NO: 186483 - DNA, 25 bp, Saccharomyces pastorianus
ggtactctaccagattgagaccagc

SEQ ID NO: 186484 - DNA, 25 bp, Saccharomyces pastorianus
tggtactctaccagattgagaccag

SEQ ID NO: 186485 - DNA, 25 bp, Saccharomyces pastorianus
aacccttttgcgcgcctgcgaagtt

SEQ ID NO: 186486 - DNA, 25 bp, Saccharomyces pastorianus
cttttgcgcgcctgcgaagtttccg

SEQ ID NO: 186487 - DNA, 25 bp, Saccharomyces pastorianus
aaaacccttttgcgcgcctgcgaag

SEQ ID NO: 186488 - DNA, 25 bp, Saccharomyces pastorianus
acccttttgcgcgcctgcgaagttt

SEQ ID NO: 186489 - DNA, 25 bp, Saccharomyces pastorianus
gtgccgaggtgccttgaaaaaccct

SEQ ID NO: 186490 - DNA, 25 bp, Saccharomyces pastorianus
aaacccttttgcgcgcctgcgaagt

SEQ ID NO: 186491 - DNA, 25 bp, Saccharomyces pastorianus
tgccgaggtgccttgaaaaaccctt

SEQ ID NO: 186492 - DNA, 25 bp, Saccharomyces pastorianus
ccaattataggggtgccgaggtgcc

SEQ ID NO: 186493 - DNA, 25 bp, Saccharomyces pastorianus
caattataggggtgccgaggtgcct

SEQ ID NO: 186494 - DNA, 25 bp, Saccharomyces pastorianus
aattataggggtgccgaggtgcctt

SEQ ID NO: 186495 - DNA, 25 bp, Saccharomyces pastorianus
attataggggtgccgaggtgccttg

SEQ ID NO: 186496 - DNA, 25 bp, Saccharomyces pastorianus
gttgccattggtattgaaccataca

SEQ ID NO: 186497 - DNA, 25 bp, Saccharomyces pastorianus
gcacaactttatatatctgtgataa

SEQ ID NO: 186498 - DNA, 25 bp, Saccharomyces pastorianus
aagtttggtttcatagttataggag

SEQ ID NO: 186499 - DNA, 25 bp, Saccharomyces pastorianus
gagaaaagagggttgccattggtat

SEQ ID NO: 186500 - DNA, 25 bp, Saccharomyces pastorianus
tgtcaccgaaaatagcagagaaaag

SEQ ID NO: 186501 - DNA, 25 bp, Saccharomyces pastorianus
agatcaaggtgctttgtttggttcc

SEQ ID NO: 186502 - DNA, 25 bp, Saccharomyces pastorianus
tagttataggagatcaaggtgcttt

SEQ ID NO: 186503 - DNA, 25 bp, Saccharomyces pastorianus
accatacaaacctattagcacaact

SEQ ID NO: 186504 - DNA, 25 bp, Saccharomyces pastorianus
gagggttgccattggtattgaacca

SEQ ID NO: 186505 - DNA, 25 bp, Saccharomyces pastorianus
aaacctattagcacaactttatata

SEQ ID NO: 186506 - DNA, 25 bp, Saccharomyces pastorianus
tggggagattgtcaccgaaaatagc

SEQ ID NO: 186507 - DNA, 25 bp, Saccharomyces pastorianus
ggctagctacgttgaagtccctgat

SEQ ID NO: 186508 - DNA, 25 bp, Saccharomyces pastorianus
gttttttgaacccagcaacgcctgt

SEQ ID NO: 186509 - DNA, 25 bp, Saccharomyces pastorianus
atcttttgcactcatttgtcgggaa

SEQ ID NO: 186510 - DNA, 25 bp, Saccharomyces pastorianus
gacccataggctccaaattgtgctc

SEQ ID NO: 186511 - DNA, 25 bp, Saccharomyces pastorianus
aggtgttcacccatttgtttgaaag

SEQ ID NO: 186512 - DNA, 25 bp, Saccharomyces pastorianus
acatctccaccgcatacgtaaaagt

SEQ ID NO: 186513 - DNA, 25 bp, Saccharomyces pastorianus
gcaacgcctgtcatgttcatgtatg

SEQ ID NO: 186514 - DNA, 25 bp, Saccharomyces pastorianus
tatgcgggctacttgactactgaat

SEQ ID NO: 186515 - DNA, 25 bp, Saccharomyces pastorianus
gaaccagacggtgcaaccacagaca

SEQ ID NO: 186516 - DNA, 25 bp, Saccharomyces pastorianus
gaagtccctgatgctggccataatc

SEQ ID NO: 186517 - DNA, 25 bp, Saccharomyces pastorianus
ggccataatcttttcctggacaacc

SEQ ID NO: 186518 - DNA, 25 bp, Saccharomyces pastorianus
actctcactttccactccatcaccc

SEQ ID NO: 186519 - DNA, 25 bp, Saccharomyces pastorianus
tctcactttccactccatcacccat

SEQ ID NO: 186520 - DNA, 25 bp, Saccharomyces pastorianus
cggccccaaatatagtataactgct

SEQ ID NO: 186521 - DNA, 25 bp, Saccharomyces pastorianus
actttccactccatcacccatctct

SEQ ID NO: 186522 - DNA, 25 bp, Saccharomyces pastorianus
tcactttccactccatcacccatct

SEQ ID NO: 186523 - DNA, 25 bp, Saccharomyces pastorianus
ctactctcactttccactccatcac

SEQ ID NO: 186524 - DNA, 25 bp, Saccharomyces pastorianus
ctctcactttccactccatcaccca

SEQ ID NO: 186525 - DNA, 25 bp, Saccharomyces pastorianus
tactctcactttccactccatcacc

SEQ ID NO: 186526 - DNA, 25 bp, Saccharomyces pastorianus
cctactctcactttccactccatca

SEQ ID NO: 186527 - DNA, 25 bp, Saccharomyces pastorianus
ccatcacccatctctcaccatcagt

SEQ ID NO: 186528 - DNA, 25 bp, Saccharomyces pastorianus
tttccactccatcacccatctctca

SEQ ID NO: 186529 - DNA, 25 bp, Saccharomyces pastorianus
agtatgtagaaatatagattccatt

SEQ ID NO: 186530 - DNA, 25 bp, Saccharomyces pastorianus
tagtatgtagaaatatagattccat

SEQ ID NO: 186531 - DNA, 25 bp, Saccharomyces pastorianus
gtagaaatatagattccattttatg

SEQ ID NO: 186532 - DNA, 25 bp, Saccharomyces pastorianus
gtatgtagaaatatagattccattt

SEQ ID NO: 186533 - DNA, 25 bp, Saccharomyces pastorianus
tgtagaaatatagattccattttat

SEQ ID NO: 186534 - DNA, 25 bp, Saccharomyces pastorianus
atatagattccattttatggattcc

SEQ ID NO: 186535 - DNA, 25 bp, Saccharomyces pastorianus
gaaatatagattccattttatggat

SEQ ID NO: 186536 - DNA, 25 bp, Saccharomyces pastorianus
ttagtatgtagaaatatagattcca

SEQ ID NO: 186537 - DNA, 25 bp, Saccharomyces pastorianus
atagattccattttatggattccta

SEQ ID NO: 186538 - DNA, 25 bp, Saccharomyces pastorianus
agaaatatagattccattttatgga

SEQ ID NO: 186539 - DNA, 25 bp, Saccharomyces pastorianus
atgtagaaatatagattccatttta

SEQ ID NO: 186540 - DNA, 25 bp, Saccharomyces pastorianus
aataagcaacgatattgtttttcaa

SEQ ID NO: 186541 - DNA, 25 bp, Saccharomyces pastorianus
gatttggcaacaacacatcacagta

SEQ ID NO: 186542 - DNA, 25 bp, Saccharomyces pastorianus
cattctattttacctattccatcca

SEQ ID NO: 186543 - DNA, 25 bp, Saccharomyces pastorianus
tccatccaactcgtctctgagaaat

SEQ ID NO: 186544 - DNA, 25 bp, Saccharomyces pastorianus
tattttacctattccatccaactcg

SEQ ID NO: 186545 - DNA, 25 bp, Saccharomyces pastorianus
tcatactacctttgaataacctttt

SEQ ID NO: 186546 - DNA, 25 bp, Saccharomyces pastorianus
tgctcaattcattcttgtctaactg

SEQ ID NO: 186547 - DNA, 25 bp, Saccharomyces pastorianus
aattataattcgatttggcaacaac

SEQ ID NO: 186548 - DNA, 25 bp, Saccharomyces pastorianus
gttcgtcgccgataatcatactacc

SEQ ID NO: 186549 - DNA, 25 bp, Saccharomyces pastorianus
aagatgttttaagttcgtcgccgat

SEQ ID NO: 186550 - DNA, 25 bp, Saccharomyces pastorianus
cattcttgtctaactgtctgaacag

SEQ ID NO: 186551 - DNA, 25 bp, Saccharomyces pastorianus
ttcctgcttcgttgttagcgtttgt

SEQ ID NO: 186552 - DNA, 25 bp, Saccharomyces pastorianus
gggttggcttcatctggatttccaa

SEQ ID NO: 186553 - DNA, 25 bp, Saccharomyces pastorianus
atttcaacacattcccttggtcaat

SEQ ID NO: 186554 - DNA, 25 bp, Saccharomyces pastorianus
gccttgttagcctcatgcggtatgg

SEQ ID NO: 186555 - DNA, 25 bp, Saccharomyces pastorianus
aaggcagtttcatcttcaggcttgt

SEQ ID NO: 186556 - DNA, 25 bp, Saccharomyces pastorianus
ggcacttttgtctcacatactgtgt

SEQ ID NO: 186557 - DNA, 25 bp, Saccharomyces pastorianus
gtaggcgcttttatctccagaggtg

SEQ ID NO: 186558 - DNA, 25 bp, Saccharomyces pastorianus
aactattgctactattcttctatgg

SEQ ID NO: 186559 - DNA, 25 bp, Saccharomyces pastorianus
gcaatcatcattattcccttggtgc

SEQ ID NO: 186560 - DNA, 25 bp, Saccharomyces pastorianus
tatccgatccaaaggcagctccaat

SEQ ID NO: 186561 - DNA, 25 bp, Saccharomyces pastorianus
aagtgcttttggatcgtccggtgaa

SEQ ID NO: 186562 - DNA, 25 bp, Saccharomyces pastorianus
gtgtcgtcgccatcgcttccggtgc

SEQ ID NO: 186563 - DNA, 25 bp, Saccharomyces pastorianus
ggtgtcgtcgccatcgcttccggtg

SEQ ID NO: 186564 - DNA, 25 bp, Saccharomyces pastorianus
accagccatctccagcgccttgtcc

SEQ ID NO: 186565 - DNA, 25 bp, Saccharomyces pastorianus
ccaccaccaccctagctcaatccga

SEQ ID NO: 186566 - DNA, 25 bp, Saccharomyces pastorianus
tgtcgtcgccatcgcttccggtgcc

SEQ ID NO: 186567 - DNA, 25 bp, Saccharomyces pastorianus
gtcgtcgccatcgcttccggtgccg

SEQ ID NO: 186568 - DNA, 25 bp, Saccharomyces pastorianus
tggtgtcgtcgccatcgcttccggt

SEQ ID NO: 186569 - DNA, 25 bp, Saccharomyces pastorianus
tcgtcgccatcgcttccggtgccgc

SEQ ID NO: 186570 - DNA, 25 bp, Saccharomyces pastorianus
gtcgccatcgcttccggtgccgccg

SEQ ID NO: 186571 - DNA, 25 bp, Saccharomyces pastorianus
tcgccatcgcttccggtgccgccgc

SEQ ID NO: 186572 - DNA, 25 bp, Saccharomyces pastorianus
atcgcttccggtgccgccgccgcca

SEQ ID NO: 186573 - DNA, 25 bp, Saccharomyces pastorianus
gaagattgtatttttcttgtgcatc

SEQ ID NO: 186574 - DNA, 25 bp, Saccharomyces pastorianus
cgtctattaagtactattcgtgtta

SEQ ID NO: 186575 - DNA, 25 bp, Saccharomyces pastorianus
aagtactattcgtgttactggtata

SEQ ID NO: 186576 - DNA, 25 bp, Saccharomyces pastorianus
gtgcatcatataatcttaggaagaa

SEQ ID NO: 186577 - DNA, 25 bp, Saccharomyces pastorianus
ttcttgtgcatcatataatcttagg

SEQ ID NO: 186578 - DNA, 25 bp, Saccharomyces pastorianus
attaagtactattcgtgttactggt

SEQ ID NO: 186579 - DNA, 25 bp, Saccharomyces pastorianus
ggacactattatataaatatcgtct

SEQ ID NO: 186580 - DNA, 25 bp, Saccharomyces pastorianus
atcgtctattaagtactattcgtgt

SEQ ID NO: 186581 - DNA, 25 bp, Saccharomyces pastorianus
aatcttaggaagaaggacactatta

SEQ ID NO: 186582 - DNA, 25 bp, Saccharomyces pastorianus
atatcgtctattaagtactattcgt

SEQ ID NO: 186583 - DNA, 25 bp, Saccharomyces pastorianus
cttgtgcatcatataatcttaggaa

SEQ ID NO: 186584 - DNA, 25 bp, Saccharomyces pastorianus
taccaaagtacgctgttttcttagt

SEQ ID NO: 186585 - DNA, 25 bp, Saccharomyces pastorianus
tgttttcttagtaatcatcgcgagt

SEQ ID NO: 186586 - DNA, 25 bp, Saccharomyces pastorianus
gacttttcttggtaataatgtcatt

SEQ ID NO: 186587 - DNA, 25 bp, Saccharomyces pastorianus
ttgtgacttttcttggtaataatgt

SEQ ID NO: 186588 - DNA, 25 bp, Saccharomyces pastorianus
aagtacgctgttttcttagtaatca

SEQ ID NO: 186589 - DNA, 25 bp, Saccharomyces pastorianus
gtgattgtgacttttcttggtaata

SEQ ID NO: 186590 - DNA, 25 bp, Saccharomyces pastorianus
acgctgttttcttagtaatcatcgc

SEQ ID NO: 186591 - DNA, 25 bp, Saccharomyces pastorianus
tgggtaccaaagtacgctgttttct

SEQ ID NO: 186592 - DNA, 25 bp, Saccharomyces pastorianus
gagtgggtaccaaagtacgctgttt

SEQ ID NO: 186593 - DNA, 25 bp, Saccharomyces pastorianus
gctgttttcttagtaatcatcgcga

SEQ ID NO: 186594 - DNA, 25 bp, Saccharomyces pastorianus
attatgagaaatgggagtgggtacc

SEQ ID NO: 186595 - DNA, 25 bp, Saccharomyces pastorianus
actgttggcggtgtcgctacagaat

SEQ ID NO: 186596 - DNA, 25 bp, Saccharomyces pastorianus
accacaactgttggcggtgtcgcta

SEQ ID NO: 186597 - DNA, 25 bp, Saccharomyces pastorianus
gtttctacagctaccacaactgttg

SEQ ID NO: 186598 - DNA, 25 bp, Saccharomyces pastorianus
caactgttggcggtgtcgctacaga

SEQ ID NO: 186599 - DNA, 25 bp, Saccharomyces pastorianus
tgttggcggtgtcgctacagaatac

SEQ ID NO: 186600 - DNA, 25 bp, Saccharomyces pastorianus
tggcggtgtcgctacagaatacact

SEQ ID NO: 186601 - DNA, 25 bp, Saccharomyces pastorianus
tgaaactacctctcctgctatcgtt

SEQ ID NO: 186602 - DNA, 25 bp, Saccharomyces pastorianus
tacagctaccacaactgttggcggt

SEQ ID NO: 186603 - DNA, 25 bp, Saccharomyces pastorianus
tctacagctaccacaactgttggcg

SEQ ID NO: 186604 - DNA, 25 bp, Saccharomyces pastorianus
tgttctgaaactacctctcctgcta

SEQ ID NO: 186605 - DNA, 25 bp, Saccharomyces pastorianus
agctaccacaactgttggcggtgtc

SEQ ID NO: 186606 - DNA, 25 bp, Saccharomyces pastorianus
gggcagccttctgcgttacaacaga

SEQ ID NO: 186607 - DNA, 25 bp, Saccharomyces pastorianus
cagccttctgcgttacaacagaaag

SEQ ID NO: 186608 - DNA, 25 bp, Saccharomyces pastorianus
tcgctttgggcagccttctgcgtta

SEQ ID NO: 186609 - DNA, 25 bp, Saccharomyces pastorianus
tttgggcagccttctgcgttacaac

SEQ ID NO: 186610 - DNA, 25 bp, Saccharomyces pastorianus
gcagccttctgcgttacaacagaaa

SEQ ID NO: 186611 - DNA, 25 bp, Saccharomyces pastorianus
agccttctgcgttacaacagaaaga

SEQ ID NO: 186612 - DNA, 25 bp, Saccharomyces pastorianus
ttgggcagccttctgcgttacaaca

SEQ ID NO: 186613 - DNA, 25 bp, Saccharomyces pastorianus
ctttgggcagccttctgcgttacaa

SEQ ID NO: 186614 - DNA, 25 bp, Saccharomyces pastorianus
gctttgggcagccttctgcgttaca

SEQ ID NO: 186615 - DNA, 25 bp, Saccharomyces pastorianus
tgggcagccttctgcgttacaacag

SEQ ID NO: 186616 - DNA, 25 bp, Saccharomyces pastorianus
gccttctgcgttacaacagaaagac

SEQ ID NO: 186617 - DNA, 25 bp, Saccharomyces pastorianus
agttgggtctttgttctgctctatc

SEQ ID NO: 186618 - DNA, 25 bp, Saccharomyces pastorianus
ctgcgagtttttccagaggtccgga

SEQ ID NO: 186619 - DNA, 25 bp, Saccharomyces pastorianus
atctactggttcatgcacactgagc

SEQ ID NO: 186620 - DNA, 25 bp, Saccharomyces pastorianus
cacactgagcaattcccggtataca

SEQ ID NO: 186621 - DNA, 25 bp, Saccharomyces pastorianus
catgcttgcttgttgggctggccaa

SEQ ID NO: 186622 - DNA, 25 bp, Saccharomyces pastorianus
gaagcatgacccatctatttctgac

SEQ ID NO: 186623 - DNA, 25 bp, Saccharomyces pastorianus
tatgtaattactgtcgcctgcgagt

SEQ ID NO: 186624 - DNA, 25 bp, Saccharomyces pastorianus
ccttcgtctttggttgcatcggtga

SEQ ID NO: 186625 - DNA, 25 bp, Saccharomyces pastorianus
ccaacctaaggcctctgtttatatc

SEQ ID NO: 186626 - DNA, 25 bp, Saccharomyces pastorianus
gaaatctgatcttcacggccttcgt

SEQ ID NO: 186627 - DNA, 25 bp, Saccharomyces pastorianus
agtggtaagttcttgatgcctcctt

SEQ ID NO: 186628 - DNA, 25 bp, Saccharomyces pastorianus
aaatttcgacccacttggtgttcat

SEQ ID NO: 186629 - DNA, 25 bp, Saccharomyces pastorianus
taggctcaggtttcgctaacaatgc

SEQ ID NO: 186630 - DNA, 25 bp, Saccharomyces pastorianus
actggttatcccttagcatacactg

SEQ ID NO: 186631 - DNA, 25 bp, Saccharomyces pastorianus
ttgtcagatctgcatacgctttggg

SEQ ID NO: 186632 - DNA, 25 bp, Saccharomyces pastorianus
atacgctttgggtgggttaggctca

SEQ ID NO: 186633 - DNA, 25 bp, Saccharomyces pastorianus
attctatggtttttgctccttcgca

SEQ ID NO: 186634 - DNA, 25 bp, Saccharomyces pastorianus
aaatgaaggaacttgccgcacagtc

SEQ ID NO: 186635 - DNA, 25 bp, Saccharomyces pastorianus
atacgctttgcaacctgatgggcta

SEQ ID NO: 186636 - DNA, 25 bp, Saccharomyces pastorianus
gttggccccacaaattcttgttgaa

SEQ ID NO: 186637 - DNA, 25 bp, Saccharomyces pastorianus
tcatatgttaagatccgccgcaatt

SEQ ID NO: 186638 - DNA, 25 bp, Saccharomyces pastorianus
gcattggcgtctaaggccactggtt

SEQ ID NO: 186639 - DNA, 25 bp, Saccharomyces pastorianus
ctcctcagatactactaagatgttt

SEQ ID NO: 186640 - DNA, 25 bp, Saccharomyces pastorianus
aaacaatcaaccctctcctcagata

SEQ ID NO: 186641 - DNA, 25 bp, Saccharomyces pastorianus
tactactaagatgtttgtactgata

SEQ ID NO: 186642 - DNA, 25 bp, Saccharomyces pastorianus
tcctcagatactactaagatgtttg

SEQ ID NO: 186643 - DNA, 25 bp, Saccharomyces pastorianus
gatactactaagatgtttgtactga

SEQ ID NO: 186644 - DNA, 25 bp, Saccharomyces pastorianus
tctcctcagatactactaagatgtt

SEQ ID NO: 186645 - DNA, 25 bp, Saccharomyces pastorianus
atgagcccgaaaaacaaatatgtat

SEQ ID NO: 186646 - DNA, 25 bp, Saccharomyces pastorianus
cctcagatactactaagatgtttgt

SEQ ID NO: 186647 - DNA, 25 bp, Saccharomyces pastorianus
ctctcctcagatactactaagatgt

SEQ ID NO: 186648 - DNA, 25 bp, Saccharomyces pastorianus
aatacataaacaatcaaccctctcc

SEQ ID NO: 186649 - DNA, 25 bp, Saccharomyces pastorianus
aaccctctcctcagatactactaag

SEQ ID NO: 186650 - DNA, 25 bp, Saccharomyces pastorianus
gtcattggatcctcattcatgcaat

SEQ ID NO: 186651 - DNA, 25 bp, Saccharomyces pastorianus
aattttattccatttctgcatccaa

SEQ ID NO: 186652 - DNA, 25 bp, Saccharomyces pastorianus
tattccatttctgcatccaatctgg

SEQ ID NO: 186653 - DNA, 25 bp, Saccharomyces pastorianus
gcatccaatctggtatttggtcaat

SEQ ID NO: 186654 - DNA, 25 bp, Saccharomyces pastorianus
ttccatttctgcatccaatctggta

SEQ ID NO: 186655 - DNA, 25 bp, Saccharomyces pastorianus
ttggatcctcattcatgcaataata

SEQ ID NO: 186656 - DNA, 25 bp, Saccharomyces pastorianus
ccatttctgcatccaatctggtatt

SEQ ID NO: 186657 - DNA, 25 bp, Saccharomyces pastorianus
gtcaatacggcgtcattggatcctc

SEQ ID NO: 186658 - DNA, 25 bp, Saccharomyces pastorianus
atttctgcatccaatctggtatttg

SEQ ID NO: 186659 - DNA, 25 bp, Saccharomyces pastorianus
ttattccatttctgcatccaatctg

SEQ ID NO: 186660 - DNA, 25 bp, Saccharomyces pastorianus
tatttggtcaatacggcgtcattgg

SEQ ID NO: 186661 - DNA, 25 bp, Saccharomyces pastorianus
tcatcatcttcatctcctacatctt

SEQ ID NO: 186662 - DNA, 25 bp, Saccharomyces pastorianus
tcagtcacatcttcaaactcatcct

SEQ ID NO: 186663 - DNA, 25 bp, Saccharomyces pastorianus
tccacctttgtatctgcagcagttg

SEQ ID NO: 186664 - DNA, 25 bp, Saccharomyces pastorianus
tagcatttgattttgcgcctgcttc

SEQ ID NO: 186665 - DNA, 25 bp, Saccharomyces pastorianus
ttttcagccgcatcttcatcatctt

SEQ ID NO: 186666 - DNA, 25 bp, Saccharomyces pastorianus
aagcggcagatgtttttgagttttc

SEQ ID NO: 186667 - DNA, 25 bp, Saccharomyces pastorianus
gtatcagttgcatcagtcacatctt

SEQ ID NO: 186668 - DNA, 25 bp, Saccharomyces pastorianus
attactgtcttttggttctgttttg

SEQ ID NO: 186669 - DNA, 25 bp, Saccharomyces pastorianus
aactcatcctcgaatgcgttttcag

SEQ ID NO: 186670 - DNA, 25 bp, Saccharomyces pastorianus
atcgtcatcatcgtcattagcattt

SEQ ID NO: 186671 - DNA, 25 bp, Saccharomyces pastorianus
tttcttcgatattgctgtcattggg

SEQ ID NO: 186672 - DNA, 25 bp, Saccharomyces pastorianus
gagacggaacttgcctttgaaattt

SEQ ID NO: 186673 - DNA, 25 bp, Saccharomyces pastorianus
gttctacaaccatattaccctgcta

SEQ ID NO: 186674 - DNA, 25 bp, Saccharomyces pastorianus
accatcctgcatgcggtgaaagaga

SEQ ID NO: 186675 - DNA, 25 bp, Saccharomyces pastorianus
tacgttaacagtttggagtacttct

SEQ ID NO: 186676 - DNA, 25 bp, Saccharomyces pastorianus
aaagaagattccacaactacaccat

SEQ ID NO: 186677 - DNA, 25 bp, Saccharomyces pastorianus
tcgatccgtttcatggttctacaac

SEQ ID NO: 186678 - DNA, 25 bp, Saccharomyces pastorianus
attttgagcaagacaacgctgacag

SEQ ID NO: 186679 - DNA, 25 bp, Saccharomyces pastorianus
gcgcatttcttcaagcctgatattc

SEQ ID NO: 186680 - DNA, 25 bp, Saccharomyces pastorianus
gagtacttcttgatggaattcaggt

SEQ ID NO: 186681 - DNA, 25 bp, Saccharomyces pastorianus
ttcgggaatccaaaagaacctggca

SEQ ID NO: 186682 - DNA, 25 bp, Saccharomyces pastorianus
gaatgcgcatttcttcaagcctgat

SEQ ID NO: 186683 - DNA, 25 bp, Saccharomyces pastorianus
gggtgatggacattctaggcttccc

SEQ ID NO: 186684 - DNA, 25 bp, Saccharomyces pastorianus
ggatcaagcatctgcggagcctaca

SEQ ID NO: 186685 - DNA, 25 bp, Saccharomyces pastorianus
atatgtatccgaactctccgtatta

SEQ ID NO: 186686 - DNA, 25 bp, Saccharomyces pastorianus
aaggatcccgagctggcaaattcta

SEQ ID NO: 186687 - DNA, 25 bp, Saccharomyces pastorianus
aacttcatcatgtagcccctcataa

SEQ ID NO: 186688 - DNA, 25 bp, Saccharomyces pastorianus
attacataccgccagttcatcagaa

SEQ ID NO: 186689 - DNA, 25 bp, Saccharomyces pastorianus
gaatatatcttatgcaccagcgctt

SEQ ID NO: 186690 - DNA, 25 bp, Saccharomyces pastorianus
ttaatgcagcttactcacctcatat

SEQ ID NO: 186691 - DNA, 25 bp, Saccharomyces pastorianus
gaataccggttatactcctcaactt

SEQ ID NO: 186692 - DNA, 25 bp, Saccharomyces pastorianus
tacatactccggaacgctgtcagat

SEQ ID NO: 186693 - DNA, 25 bp, Saccharomyces pastorianus
tacgagtcctcccaattatacagaa

SEQ ID NO: 186694 - DNA, 25 bp, Saccharomyces pastorianus
gtgaaagtacgcatcgtagagctgt

SEQ ID NO: 186695 - DNA, 25 bp, Saccharomyces pastorianus
tggcactcgctatttcgtaacaacg

SEQ ID NO: 186696 - DNA, 25 bp, Saccharomyces pastorianus
tcgtaacaacgttccaggacacgga

SEQ ID NO: 186697 - DNA, 25 bp, Saccharomyces pastorianus
ctcgctatttcgtaacaacgttcca

SEQ ID NO: 186698 - DNA, 25 bp, Saccharomyces pastorianus
tttcgtaacaacgttccaggacacg

SEQ ID NO: 186699 - DNA, 25 bp, Saccharomyces pastorianus
cactcgctatttcgtaacaacgttc

SEQ ID NO: 186700 - DNA, 25 bp, Saccharomyces pastorianus
tatttcgtaacaacgttccaggaca

SEQ ID NO: 186701 - DNA, 25 bp, Saccharomyces pastorianus
gctatttcgtaacaacgttccagga

SEQ ID NO: 186702 - DNA, 25 bp, Saccharomyces pastorianus
gcactcgctatttcgtaacaacgtt

SEQ ID NO: 186703 - DNA, 25 bp, Saccharomyces pastorianus
ggcactcgctatttcgtaacaacgt

SEQ ID NO: 186704 - DNA, 25 bp, Saccharomyces pastorianus
ctggcactcgctatttcgtaacaac

SEQ ID NO: 186705 - DNA, 25 bp, Saccharomyces pastorianus
ggtcaaatctagggccatgtcgatt

SEQ ID NO: 186706 - DNA, 25 bp, Saccharomyces pastorianus
tttgatcgggtttttcacaccattc

SEQ ID NO: 186707 - DNA, 25 bp, Saccharomyces pastorianus
cgaaggtcaaatctagggccatgtc

SEQ ID NO: 186708 - DNA, 25 bp, Saccharomyces pastorianus
aggtcaaatctagggccatgtcgat

SEQ ID NO: 186709 - DNA, 25 bp, Saccharomyces pastorianus
ggccatgtcgatttcgactgcatgc

SEQ ID NO: 186710 - DNA, 25 bp, Saccharomyces pastorianus
aaggtcaaatctagggccatgtcga

SEQ ID NO: 186711 - DNA, 25 bp, Saccharomyces pastorianus
ctaggagaggtatttcttcggaaga

SEQ ID NO: 186712 - DNA, 25 bp, Saccharomyces pastorianus
aaatgtctgttatttggtgcagctg

SEQ ID NO: 186713 - DNA, 25 bp, Saccharomyces pastorianus
tgggtcccaccttctaggagaggta

SEQ ID NO: 186714 - DNA, 25 bp, Saccharomyces pastorianus
gaaggtcaaatctagggccatgtcg

SEQ ID NO: 186715 - DNA, 25 bp, Saccharomyces pastorianus
gcaactggttgtggcaatttttgat

SEQ ID NO: 186716 - DNA, 25 bp, Saccharomyces pastorianus
gtgtgtttcttctgctggagcctca

SEQ ID NO: 186717 - DNA, 25 bp, Saccharomyces pastorianus
cattttggtcaagctcgtgtgtttc

SEQ ID NO: 186718 - DNA, 25 bp, Saccharomyces pastorianus
gtgtgttccccttcgtcgttctcat

SEQ ID NO: 186719 - DNA, 25 bp, Saccharomyces pastorianus
gtcgttctcatcctcttcttcgttc

SEQ ID NO: 186720 - DNA, 25 bp, Saccharomyces pastorianus
taatcttgccctcttgcgtgtgttc

SEQ ID NO: 186721 - DNA, 25 bp, Saccharomyces pastorianus
gtttcttctgctggagcctcaccgg

SEQ ID NO: 186722 - DNA, 25 bp, Saccharomyces pastorianus
tttggtcaagctcgtgtgtttcttc

SEQ ID NO: 186723 - DNA, 25 bp, Saccharomyces pastorianus
aagctcgtgtgtttcttctgctgga

SEQ ID NO: 186724 - DNA, 25 bp, Saccharomyces pastorianus
gagcctcaccggcatcgccggtaat

SEQ ID NO: 186725 - DNA, 25 bp, Saccharomyces pastorianus
gaggtcattttggtcaagctcgtgt

SEQ ID NO: 186726 - DNA, 25 bp, Saccharomyces pastorianus
gcatcgccggtaatcttgccctctt

SEQ ID NO: 186727 - DNA, 25 bp, Saccharomyces pastorianus
ataactgcattcaccaaggccgtct

SEQ ID NO: 186728 - DNA, 25 bp, Saccharomyces pastorianus
tgtccccaattccagccaataaaat

SEQ ID NO: 186729 - DNA, 25 bp, Saccharomyces pastorianus
gcatcaaatcattcacaattgcggt

SEQ ID NO: 186730 - DNA, 25 bp, Saccharomyces pastorianus
gtaaacaacacttctacctgtcctg

SEQ ID NO: 186731 - DNA, 25 bp, Saccharomyces pastorianus
atgtttttggaactgctgcctccga

SEQ ID NO: 186732 - DNA, 25 bp, Saccharomyces pastorianus
tagtcaaagaatactgtccccaatt

SEQ ID NO: 186733 - DNA, 25 bp, Saccharomyces pastorianus
cttggaccctaagctattggacgtt

SEQ ID NO: 186734 - DNA, 25 bp, Saccharomyces pastorianus
aacactatcagtacgctcgatcttg

SEQ ID NO: 186735 - DNA, 25 bp, Saccharomyces pastorianus
gatcggaatccacaggagcccttgg

SEQ ID NO: 186736 - DNA, 25 bp, Saccharomyces pastorianus
ctacctgtcctgaatcacttgcaaa

SEQ ID NO: 186737 - DNA, 25 bp, Saccharomyces pastorianus
gagcgtgagctaacatcagccttat

SEQ ID NO: 186738 - DNA, 25 bp, Saccharomyces pastorianus
gtatgttggaatgtggatcgactat

SEQ ID NO: 186739 - DNA, 25 bp, Saccharomyces pastorianus
tggtatgttggaatgtggatcgact

SEQ ID NO: 186740 - DNA, 25 bp, Saccharomyces pastorianus
aatgtggatcgactatcatctacta

SEQ ID NO: 186741 - DNA, 25 bp, Saccharomyces pastorianus
atgtggatcgactatcatctactaa

SEQ ID NO: 186742 - DNA, 25 bp, Saccharomyces pastorianus
gttggaatgtggatcgactatcatc

SEQ ID NO: 186743 - DNA, 25 bp, Saccharomyces pastorianus
ggaatgtggatcgactatcatctac

SEQ ID NO: 186744 - DNA, 25 bp, Saccharomyces pastorianus
atgttggaatgtggatcgactatca

SEQ ID NO: 186745 - DNA, 25 bp, Saccharomyces pastorianus
ttggaatgtggatcgactatcatct

SEQ ID NO: 186746 - DNA, 25 bp, Saccharomyces pastorianus
tggaatgtggatcgactatcatcta

SEQ ID NO: 186747 - DNA, 25 bp, Saccharomyces pastorianus
tatgttggaatgtggatcgactatc

SEQ ID NO: 186748 - DNA, 25 bp, Saccharomyces pastorianus
gaatgtggatcgactatcatctact

SEQ ID NO: 186749 - DNA, 25 bp, Saccharomyces pastorianus
ttcagccttcgatgcgtgtcataat

SEQ ID NO: 186750 - DNA, 25 bp, Saccharomyces pastorianus
atttcctcaacctcatccagaaaga

SEQ ID NO: 186751 - DNA, 25 bp, Saccharomyces pastorianus
atatcgccggtattgaaattcctga

SEQ ID NO: 186752 - DNA, 25 bp, Saccharomyces pastorianus
gcttcttcaagatcccaaatttcct

SEQ ID NO: 186753 - DNA, 25 bp, Saccharomyces pastorianus
atcgtcaatacagcacatccggttg

SEQ ID NO: 186754 - DNA, 25 bp, Saccharomyces pastorianus
taatggtgcatcttttttcaaactg

SEQ ID NO: 186755 - DNA, 25 bp, Saccharomyces pastorianus
gcctgactcaggtatttttccgtgt

SEQ ID NO: 186756 - DNA, 25 bp, Saccharomyces pastorianus
atgacaatcggttacgtagccgtaa

SEQ ID NO: 186757 - DNA, 25 bp, Saccharomyces pastorianus
aaactgcttcaagagcctgactcag

SEQ ID NO: 186758 - DNA, 25 bp, Saccharomyces pastorianus
ttctgttgacaaatccaccgtgttt

SEQ ID NO: 186759 - DNA, 25 bp, Saccharomyces pastorianus
taggcggtgctattggatcccctca

SEQ ID NO: 186760 - DNA, 25 bp, Saccharomyces pastorianus
acaacagcagcagcagcagcagcag

SEQ ID NO: 186761 - DNA, 25 bp, Saccharomyces pastorianus
aacaaaagcaacaacaacagcagca

SEQ ID NO: 186762 - DNA, 25 bp, Saccharomyces pastorianus
cagcagcagcagcaaggacaaatac

SEQ ID NO: 186763 - DNA, 25 bp, Saccharomyces pastorianus
gcagcagcatcagcaacaacaacaa

SEQ ID NO: 186764 - DNA, 25 bp, Saccharomyces pastorianus
acaaaagcaacaacaacagcagcag

SEQ ID NO: 186765 - DNA, 25 bp, Saccharomyces pastorianus
caacaaaagcaacaacaacagcagc

SEQ ID NO: 186766 - DNA, 25 bp, Saccharomyces pastorianus
caacagcagcaacaaaagcaacaac

SEQ ID NO: 186767 - DNA, 25 bp, Saccharomyces pastorianus
cagcaacagcagcaacagcaacagc

SEQ ID NO: 186768 - DNA, 25 bp, Saccharomyces pastorianus
agcagcatcagcaacaacaacaaca

SEQ ID NO: 186769 - DNA, 25 bp, Saccharomyces pastorianus
gcaacaaaagcaacaacaacagcag

SEQ ID NO: 186770 - DNA, 25 bp, Saccharomyces pastorianus
agcagcaacaacaacagcaacaaca

SEQ ID NO: 186771 - DNA, 25 bp, Saccharomyces pastorianus
ggaatgtcgcaccattaacgggcgc

SEQ ID NO: 186772 - DNA, 25 bp, Saccharomyces pastorianus
gcggacctaaccattgttggcccaa

SEQ ID NO: 186773 - DNA, 25 bp, Saccharomyces pastorianus
aatgtcgcaccattaacgggcgcgg

SEQ ID NO: 186774 - DNA, 25 bp, Saccharomyces pastorianus
tgtcgcaccattaacgggcgcggac

SEQ ID NO: 186775 - DNA, 25 bp, Saccharomyces pastorianus
ttaacgggcgcggacctaaccattg

SEQ ID NO: 186776 - DNA, 25 bp, Saccharomyces pastorianus
cccagaaatctcatgactaattcaa

SEQ ID NO: 186777 - DNA, 25 bp, Saccharomyces pastorianus
acgtcaggaatgtcgcaccattaac

SEQ ID NO: 186778 - DNA, 25 bp, Saccharomyces pastorianus
acgggcgcggacctaaccattgttg

SEQ ID NO: 186779 - DNA, 25 bp, Saccharomyces pastorianus
gaaatctcatgactaattcaaacgt

SEQ ID NO: 186780 - DNA, 25 bp, Saccharomyces pastorianus
tcaaacgtcaggaatgtcgcaccat

SEQ ID NO: 186781 - DNA, 25 bp, Saccharomyces pastorianus
gggcgcggacctaaccattgttggc

SEQ ID NO: 186782 - DNA, 25 bp, Saccharomyces pastorianus
gtgcttgcttctgttcaagttcttt

SEQ ID NO: 186783 - DNA, 25 bp, Saccharomyces pastorianus
tctggaccagattccgccttttgtt

SEQ ID NO: 186784 - DNA, 25 bp, Saccharomyces pastorianus
atttcatcaacattctccaaaggag

SEQ ID NO: 186785 - DNA, 25 bp, Saccharomyces pastorianus
tcggaaaattctgctctttcggctt

SEQ ID NO: 186786 - DNA, 25 bp, Saccharomyces pastorianus
caattctgggacttcttcttcacta

SEQ ID NO: 186787 - DNA, 25 bp, Saccharomyces pastorianus
tttcgttggcctgttctggaccaga

SEQ ID NO: 186788 - DNA, 25 bp, Saccharomyces pastorianus
ttctaattcattctcttcatcctct

SEQ ID NO: 186789 - DNA, 25 bp, Saccharomyces pastorianus
aatagcagcccatgacatcttcttt

SEQ ID NO: 186790 - DNA, 25 bp, Saccharomyces pastorianus
tcgtcttcttcgttcaattctggga

SEQ ID NO: 186791 - DNA, 25 bp, Saccharomyces pastorianus
gttcttccttcttaatttcacttat

SEQ ID NO: 186792 - DNA, 25 bp, Saccharomyces pastorianus
cacttatttccttcttcatttcatc

SEQ ID NO: 186793 - DNA, 25 bp, Saccharomyces pastorianus
agatctgcagtacctcggtagcaag

SEQ ID NO: 186794 - DNA, 25 bp, Saccharomyces pastorianus
tttcttccgcaacgatcaaacgatc

SEQ ID NO: 186795 - DNA, 25 bp, Saccharomyces pastorianus
attagggatttcttccgcaacgatc

SEQ ID NO: 186796 - DNA, 25 bp, Saccharomyces pastorianus
gcaagtaccccatgttttcgggata

SEQ ID NO: 186797 - DNA, 25 bp, Saccharomyces pastorianus
caagtctggtattagcattgctaag

SEQ ID NO: 186798 - DNA, 25 bp, Saccharomyces pastorianus
taatccaacccttaatcgagagaag

SEQ ID NO: 186799 - DNA, 25 bp, Saccharomyces pastorianus
gtttcaattgacaccagatctgcag

SEQ ID NO: 186800 - DNA, 25 bp, Saccharomyces pastorianus
tacccctagcactgctcaaggtgaa

SEQ ID NO: 186801 - DNA, 25 bp, Saccharomyces pastorianus
tttcgggatattctgggtatgttca

SEQ ID NO: 186802 - DNA, 25 bp, Saccharomyces pastorianus
ggtatgttcaaagttcaagtctggt

SEQ ID NO: 186803 - DNA, 25 bp, Saccharomyces pastorianus
gtacatctaaggctatttgggtttt

SEQ ID NO: 186804 - DNA, 25 bp, Saccharomyces pastorianus
aagtggcgctcttttaatggtcgtc

SEQ ID NO: 186805 - DNA, 25 bp, Saccharomyces pastorianus
aacttgggaattgctcctgtcgttt

SEQ ID NO: 186806 - DNA, 25 bp, Saccharomyces pastorianus
ggaaatatcgtggtcgcggttttga

SEQ ID NO: 186807 - DNA, 25 bp, Saccharomyces pastorianus
gatttgatctctacgcttgtggact

SEQ ID NO: 186808 - DNA, 25 bp, Saccharomyces pastorianus
taggcggcttgggatgctctgacac

SEQ ID NO: 186809 - DNA, 25 bp, Saccharomyces pastorianus
tctgatgacatcacccctaaagatc

SEQ ID NO: 186810 - DNA, 25 bp, Saccharomyces pastorianus
tggtattgccgcgacatttttatcc

SEQ ID NO: 186811 - DNA, 25 bp, Saccharomyces pastorianus
gctgtctttgatctgcccgaaactg

SEQ ID NO: 186812 - DNA, 25 bp, Saccharomyces pastorianus
cttccagaccgttatgctgttcatt

SEQ ID NO: 186813 - DNA, 25 bp, Saccharomyces pastorianus
gatatggaagctttcgccgaggaga

SEQ ID NO: 186814 - DNA, 25 bp, Saccharomyces pastorianus
taatggtcgtcgcattctcttacaa

SEQ ID NO: 186815 - DNA, 25 bp, Saccharomyces pastorianus
caacgtcaacctaaagggccagagc

SEQ ID NO: 186816 - DNA, 25 bp, Saccharomyces pastorianus
gttcttgaccatggccagacagatc

SEQ ID NO: 186817 - DNA, 25 bp, Saccharomyces pastorianus
ggacgcgttcttgaccatggccaga

SEQ ID NO: 186818 - DNA, 25 bp, Saccharomyces pastorianus
gggcaacgtcaacctaaagggccag

SEQ ID NO: 186819 - DNA, 25 bp, Saccharomyces pastorianus
gcgttcttgaccatggccagacaga

SEQ ID NO: 186820 - DNA, 25 bp, Saccharomyces pastorianus
gtcgaggacgcgttcttgaccatgg

SEQ ID NO: 186821 - DNA, 25 bp, Saccharomyces pastorianus
tggccagacagatcaaggagagtat

SEQ ID NO: 186822 - DNA, 25 bp, Saccharomyces pastorianus
tgaccatggccagacagatcaagga

SEQ ID NO: 186823 - DNA, 25 bp, Saccharomyces pastorianus
gaggacgcgttcttgaccatggcca

SEQ ID NO: 186824 - DNA, 25 bp, Saccharomyces pastorianus
gacaagggcaacgtcaacctaaagg

SEQ ID NO: 186825 - DNA, 25 bp, Saccharomyces pastorianus
gatgacaagggcaacgtcaacctaa

SEQ ID NO: 186826 - DNA, 25 bp, Saccharomyces pastorianus
ggaaacgatagcctatccacgtata

SEQ ID NO: 186827 - DNA, 25 bp, Saccharomyces pastorianus
gaccgcatagaactggaaagcttcc

SEQ ID NO: 186828 - DNA, 25 bp, Saccharomyces pastorianus
agttactgcccgaccgcatagaact

SEQ ID NO: 186829 - DNA, 25 bp, Saccharomyces pastorianus
aagccgtactaagcactctcaagga

SEQ ID NO: 186830 - DNA, 25 bp, Saccharomyces pastorianus
agcactctcaaggaaatgggatata

SEQ ID NO: 186831 - DNA, 25 bp, Saccharomyces pastorianus
gttaatgctatacgcaatgtcaggg

SEQ ID NO: 186832 - DNA, 25 bp, Saccharomyces pastorianus
tcggcaaagccgtactaagcactct

SEQ ID NO: 186833 - DNA, 25 bp, Saccharomyces pastorianus
gaagtatttcccaagagcgtagtta

SEQ ID NO: 186834 - DNA, 25 bp, Saccharomyces pastorianus
gaaagcttccccatgatcggcaaag

SEQ ID NO: 186835 - DNA, 25 bp, Saccharomyces pastorianus
gaatggcatgcggtgagtgactatt

SEQ ID NO: 186836 - DNA, 25 bp, Saccharomyces pastorianus
tccacgtatacaccaccagttactg

SEQ ID NO: 186837 - DNA, 25 bp, Saccharomyces pastorianus
tgcaacgctctaccactaagctaag

SEQ ID NO: 186838 - DNA, 25 bp, Saccharomyces pastorianus
tttgcattacaagtgcaacgctcta

SEQ ID NO: 186839 - DNA, 25 bp, Saccharomyces pastorianus
aacgctctaccactaagctaaggag

SEQ ID NO: 186840 - DNA, 25 bp, Saccharomyces pastorianus
gtgcaacgctctaccactaagctaa

SEQ ID NO: 186841 - DNA, 25 bp, Saccharomyces pastorianus
acgctctaccactaagctaaggagg

SEQ ID NO: 186842 - DNA, 25 bp, Saccharomyces pastorianus
caacgctctaccactaagctaagga

SEQ ID NO: 186843 - DNA, 25 bp, Saccharomyces pastorianus
aagtgcaacgctctaccactaagct

SEQ ID NO: 186844 - DNA, 25 bp, Saccharomyces pastorianus
gcattacaagtgcaacgctctacca

SEQ ID NO: 186845 - DNA, 25 bp, Saccharomyces pastorianus
agtgcaacgctctaccactaagcta

SEQ ID NO: 186846 - DNA, 25 bp, Saccharomyces pastorianus
gcaacgctctaccactaagctaagg

SEQ ID NO: 186847 - DNA, 25 bp, Saccharomyces pastorianus
attacaagtgcaacgctctaccact

SEQ ID NO: 186848 - DNA, 25 bp, Saccharomyces pastorianus
cagattaaagccagccatctccagt

SEQ ID NO: 186849 - DNA, 25 bp, Saccharomyces pastorianus
aaagccagccatctccagtgctcta

SEQ ID NO: 186850 - DNA, 25 bp, Saccharomyces pastorianus
ttccatggtactccagcagattaaa

SEQ ID NO: 186851 - DNA, 25 bp, Saccharomyces pastorianus
tgatcaccggtgttccatggtactc

SEQ ID NO: 186852 - DNA, 25 bp, Saccharomyces pastorianus
agattaaagccagccatctccagtg

SEQ ID NO: 186853 - DNA, 25 bp, Saccharomyces pastorianus
attaaagccagccatctccagtgct

SEQ ID NO: 186854 - DNA, 25 bp, Saccharomyces pastorianus
gattaaagccagccatctccagtgc

SEQ ID NO: 186855 - DNA, 25 bp, Saccharomyces pastorianus
tccatggtactccagcagattaaag

SEQ ID NO: 186856 - DNA, 25 bp, Saccharomyces pastorianus
atgatcaccggtgttccatggtact

SEQ ID NO: 186857 - DNA, 25 bp, Saccharomyces pastorianus
taaagccagccatctccagtgctct

SEQ ID NO: 186858 - DNA, 25 bp, Saccharomyces pastorianus
ttaaagccagccatctccagtgctc

SEQ ID NO: 186859 - DNA, 25 bp, Saccharomyces pastorianus
tcaatcaatcattcgtcggcagtgg

SEQ ID NO: 186860 - DNA, 25 bp, Saccharomyces pastorianus
atccatcttccacaataaacgccag

SEQ ID NO: 186861 - DNA, 25 bp, Saccharomyces pastorianus
aacgaaccagttgatctgctgtcag

SEQ ID NO: 186862 - DNA, 25 bp, Saccharomyces pastorianus
aatggctcttcatctatcaccaatg

SEQ ID NO: 186863 - DNA, 25 bp, Saccharomyces pastorianus
actaggccagttatatccatcttcc

SEQ ID NO: 186864 - DNA, 25 bp, Saccharomyces pastorianus
ggaggcaaactcaggtgtcacctta

SEQ ID NO: 186865 - DNA, 25 bp, Saccharomyces pastorianus
aacgccagccaaatttgcaagcagt

SEQ ID NO: 186866 - DNA, 25 bp, Saccharomyces pastorianus
atgacattgctcagctgcccaaaaa

SEQ ID NO: 186867 - DNA, 25 bp, Saccharomyces pastorianus
gaatgtatatgcttccttgctctct

SEQ ID NO: 186868 - DNA, 25 bp, Saccharomyces pastorianus
gcaaggcttctactggcgacaatgt

SEQ ID NO: 186869 - DNA, 25 bp, Saccharomyces pastorianus
gtgtcaccttaccattggatgccaa

SEQ ID NO: 186870 - DNA, 25 bp, Saccharomyces pastorianus
atctattacattatgggtggtatgt

SEQ ID NO: 186871 - DNA, 25 bp, Saccharomyces pastorianus
ctattacattatgggtggtatgttg

SEQ ID NO: 186872 - DNA, 25 bp, Saccharomyces pastorianus
cattatgggtggtatgttggaataa

SEQ ID NO: 186873 - DNA, 25 bp, Saccharomyces pastorianus
tctattacattatgggtggtatgtt

SEQ ID NO: 186874 - DNA, 25 bp, Saccharomyces pastorianus
cattagatctattacattatgggtg

SEQ ID NO: 186875 - DNA, 25 bp, Saccharomyces pastorianus
ttagatctattacattatgggtggt

SEQ ID NO: 186876 - DNA, 25 bp, Saccharomyces pastorianus
attatgggtggtatgttggaataaa

SEQ ID NO: 186877 - DNA, 25 bp, Saccharomyces pastorianus
tcattagatctattacattatgggt

SEQ ID NO: 186878 - DNA, 25 bp, Saccharomyces pastorianus
gatctattacattatgggtggtatg

SEQ ID NO: 186879 - DNA, 25 bp, Saccharomyces pastorianus
ttcattagatctattacattatggg

SEQ ID NO: 186880 - DNA, 25 bp, Saccharomyces pastorianus
attagatctattacattatgggtgg

SEQ ID NO: 186881 - DNA, 25 bp, Saccharomyces pastorianus
tcacttggcccaatactacatgttc

SEQ ID NO: 186882 - DNA, 25 bp, Saccharomyces pastorianus
aatactacatgttccaagccgccca

SEQ ID NO: 186883 - DNA, 25 bp, Saccharomyces pastorianus
tacatgttccaagccgcccacccaa

SEQ ID NO: 186884 - DNA, 25 bp, Saccharomyces pastorianus
cacttggcccaatactacatgttcc

SEQ ID NO: 186885 - DNA, 25 bp, Saccharomyces pastorianus
atactacatgttccaagccgcccac

SEQ ID NO: 186886 - DNA, 25 bp, Saccharomyces pastorianus
acttggcccaatactacatgttcca

SEQ ID NO: 186887 - DNA, 25 bp, Saccharomyces pastorianus
gccatcgctgctactgcttctgcaa

SEQ ID NO: 186888 - DNA, 25 bp, Saccharomyces pastorianus
tactacatgttccaagccgcccacc

SEQ ID NO: 186889 - DNA, 25 bp, Saccharomyces pastorianus
ttctgcaaccaccactctagctcaa

SEQ ID NO: 186890 - DNA, 25 bp, Saccharomyces pastorianus
tactgcttctgcaaccaccactcta

SEQ ID NO: 186891 - DNA, 25 bp, Saccharomyces pastorianus
cttggcccaatactacatgttccaa

SEQ ID NO: 186892 - DNA, 25 bp, Saccharomyces pastorianus
ttgaatgaccctaatgcacgctttg

SEQ ID NO: 186893 - DNA, 25 bp, Saccharomyces pastorianus
tatgctgcaggctttcaacaccttc

SEQ ID NO: 186894 - DNA, 25 bp, Saccharomyces pastorianus
aggccgatacctcttactgtaaatc

SEQ ID NO: 186895 - DNA, 25 bp, Saccharomyces pastorianus
aacaccttcgattctgagtttgcag

SEQ ID NO: 186896 - DNA, 25 bp, Saccharomyces pastorianus
gatgaattgggaacgccctccggta

SEQ ID NO: 186897 - DNA, 25 bp, Saccharomyces pastorianus
aattacgagctcacagcaactgctt

SEQ ID NO: 186898 - DNA, 25 bp, Saccharomyces pastorianus
aagcatcttgtttggcgctgttgac

SEQ ID NO: 186899 - DNA, 25 bp, Saccharomyces pastorianus
cgtatcgcttccttctgcagaagaa

SEQ ID NO: 186900 - DNA, 25 bp, Saccharomyces pastorianus
gcaactgcttctgagatttcctcta

SEQ ID NO: 186901 - DNA, 25 bp, Saccharomyces pastorianus
taaggcttctaatacaccctgctcg

SEQ ID NO: 186902 - DNA, 25 bp, Saccharomyces pastorianus
atggtggcattttaggcgtatcgct

SEQ ID NO: 186903 - DNA, 25 bp, Saccharomyces pastorianus
atggatttatcccttcttagctacc

SEQ ID NO: 186904 - DNA, 25 bp, Saccharomyces pastorianus
gtactaccaaaggatatcttcagaa

SEQ ID NO: 186905 - DNA, 25 bp, Saccharomyces pastorianus
acttggttctgttacgagacttaca

SEQ ID NO: 186906 - DNA, 25 bp, Saccharomyces pastorianus
aattcatttacttggttctgttacg

SEQ ID NO: 186907 - DNA, 25 bp, Saccharomyces pastorianus
gaatcacaaaacatcgtactaccaa

SEQ ID NO: 186908 - DNA, 25 bp, Saccharomyces pastorianus
ttatcgtctaagagtgttgaatcac

SEQ ID NO: 186909 - DNA, 25 bp, Saccharomyces pastorianus
ctcactgcttggtggaaggtgtcca

SEQ ID NO: 186910 - DNA, 25 bp, Saccharomyces pastorianus
gagacttacaagtccctagcgtttc

SEQ ID NO: 186911 - DNA, 25 bp, Saccharomyces pastorianus
aagtccctagcgtttcgtatctggt

SEQ ID NO: 186912 - DNA, 25 bp, Saccharomyces pastorianus
ttatggttgccgctcactgcttggt

SEQ ID NO: 186913 - DNA, 25 bp, Saccharomyces pastorianus
agagcgtaggcttattatcgtctaa

SEQ ID NO: 186914 - DNA, 25 bp, Saccharomyces pastorianus
atagctacgaatctatcagcccgta

SEQ ID NO: 186915 - DNA, 25 bp, Saccharomyces pastorianus
tacagcatagctacgaatctatcag

SEQ ID NO: 186916 - DNA, 25 bp, Saccharomyces pastorianus
agctacgaatctatcagcccgtaac

SEQ ID NO: 186917 - DNA, 25 bp, Saccharomyces pastorianus
acgaatctatcagcccgtaacttaa

SEQ ID NO: 186918 - DNA, 25 bp, Saccharomyces pastorianus
gaatctatcagcccgtaacttaaac

SEQ ID NO: 186919 - DNA, 25 bp, Saccharomyces pastorianus
atgctacagcatagctacgaatcta

SEQ ID NO: 186920 - DNA, 25 bp, Saccharomyces pastorianus
gctacgaatctatcagcccgtaact

SEQ ID NO: 186921 - DNA, 25 bp, Saccharomyces pastorianus
ctacgaatctatcagcccgtaactt

SEQ ID NO: 186922 - DNA, 25 bp, Saccharomyces pastorianus
gctacagcatagctacgaatctatc

SEQ ID NO: 186923 - DNA, 25 bp, Saccharomyces pastorianus
tcatgctacagcatagctacgaatc

SEQ ID NO: 186924 - DNA, 25 bp, Saccharomyces pastorianus
catagctacgaatctatcagcccgt

SEQ ID NO: 186925 - DNA, 25 bp, Saccharomyces pastorianus
gacacattcagttcacatctgagtt

SEQ ID NO: 186926 - DNA, 25 bp, Saccharomyces pastorianus
gagtttgatctcattgattgtgctt

SEQ ID NO: 186927 - DNA, 25 bp, Saccharomyces pastorianus
gcagcattcacattcgggaaagcga

SEQ ID NO: 186928 - DNA, 25 bp, Saccharomyces pastorianus
gctcttcccgaagacacattcagtt

SEQ ID NO: 186929 - DNA, 25 bp, Saccharomyces pastorianus
atgatcatcataatcgtgagtttga

SEQ ID NO: 186930 - DNA, 25 bp, Saccharomyces pastorianus
gttcacatctgagttatgtacttta

SEQ ID NO: 186931 - DNA, 25 bp, Saccharomyces pastorianus
gttatgtactttatgaaattgctca

SEQ ID NO: 186932 - DNA, 25 bp, Saccharomyces pastorianus
gattgtgctttttcatgataacgac

SEQ ID NO: 186933 - DNA, 25 bp, Saccharomyces pastorianus
tggtggttgcagcattcacattcgg

SEQ ID NO: 186934 - DNA, 25 bp, Saccharomyces pastorianus
agagaatgtagctcttcccgaagac

SEQ ID NO: 186935 - DNA, 25 bp, Saccharomyces pastorianus
gaaattgctcattgtaaaccgatca

SEQ ID NO: 186936 - DNA, 25 bp, Saccharomyces pastorianus
ggagaacttctagtactttctacat

SEQ ID NO: 186937 - DNA, 25 bp, Saccharomyces pastorianus
tgccttattaaaaatggaatcccaa

SEQ ID NO: 186938 - DNA, 25 bp, Saccharomyces pastorianus
tattgccttattaaaaatggaatcc

SEQ ID NO: 186939 - DNA, 25 bp, Saccharomyces pastorianus
tctagtactttctacatacctaata

SEQ ID NO: 186940 - DNA, 25 bp, Saccharomyces pastorianus
ctagtactttctacatacctaatat

SEQ ID NO: 186941 - DNA, 25 bp, Saccharomyces pastorianus
aacttctagtactttctacatacct

SEQ ID NO: 186942 - DNA, 25 bp, Saccharomyces pastorianus
cttttatggattcctaaatcctcga

SEQ ID NO: 186943 - DNA, 25 bp, Saccharomyces pastorianus
ttgccttattaaaaatggaatccca

SEQ ID NO: 186944 - DNA, 25 bp, Saccharomyces pastorianus
agaattgtgtagaattgcagattcc

SEQ ID NO: 186945 - DNA, 25 bp, Saccharomyces pastorianus
gcatacatccattgacagacgcgaa

SEQ ID NO: 186946 - DNA, 25 bp, Saccharomyces pastorianus
gacagacgcgaaagttgataacata

SEQ ID NO: 186947 - DNA, 25 bp, Saccharomyces pastorianus
tgcatttagggctctgcctcaatat

SEQ ID NO: 186948 - DNA, 25 bp, Saccharomyces pastorianus
gggagctcaatttgttactagtaga

SEQ ID NO: 186949 - DNA, 25 bp, Saccharomyces pastorianus
gggctctgcctcaatatttgcagta

SEQ ID NO: 186950 - DNA, 25 bp, Saccharomyces pastorianus
gatccgtgacggttctgacactgaa

SEQ ID NO: 186951 - DNA, 25 bp, Saccharomyces pastorianus
taacatactcttgcatttagggctc

SEQ ID NO: 186952 - DNA, 25 bp, Saccharomyces pastorianus
gaaaataggttagtacagggcctgt

SEQ ID NO: 186953 - DNA, 25 bp, Saccharomyces pastorianus
tatttgttaaaatgatccgtgacgg

SEQ ID NO: 186954 - DNA, 25 bp, Saccharomyces pastorianus
gagctggaagcatttaaatcggaaa

SEQ ID NO: 186955 - DNA, 25 bp, Saccharomyces pastorianus
acttgacggcaaattatggtatgat

SEQ ID NO: 186956 - DNA, 25 bp, Saccharomyces pastorianus
gcaatcgaggtctttgaaggccatg

SEQ ID NO: 186957 - DNA, 25 bp, Saccharomyces pastorianus
gtttctaccacgcaatcgaggtctt

SEQ ID NO: 186958 - DNA, 25 bp, Saccharomyces pastorianus
ttctaccacgcaatcgaggtctttg

SEQ ID NO: 186959 - DNA, 25 bp, Saccharomyces pastorianus
gctaacatatgggtccatagtggca

SEQ ID NO: 186960 - DNA, 25 bp, Saccharomyces pastorianus
tgggtccatagtggcacaattgtgc

SEQ ID NO: 186961 - DNA, 25 bp, Saccharomyces pastorianus
atggtttctaccacgcaatcgaggt

SEQ ID NO: 186962 - DNA, 25 bp, Saccharomyces pastorianus
aatcaatacagaattatttacgcta

SEQ ID NO: 186963 - DNA, 25 bp, Saccharomyces pastorianus
cgcaatcgaggtctttgaaggccat

SEQ ID NO: 186964 - DNA, 25 bp, Saccharomyces pastorianus
atttacgctaacatatgggtccata

SEQ ID NO: 186965 - DNA, 25 bp, Saccharomyces pastorianus
ttatttacgctaacatatgggtcca

SEQ ID NO: 186966 - DNA, 25 bp, Saccharomyces pastorianus
acaattgtgccaagattatgaacgg

SEQ ID NO: 186967 - DNA, 25 bp, Saccharomyces pastorianus
taactcgccggcaagttgagcgtgc

SEQ ID NO: 186968 - DNA, 25 bp, Saccharomyces pastorianus
tatcgcggagataagacccttgccc

SEQ ID NO: 186969 - DNA, 25 bp, Saccharomyces pastorianus
agatggcacatctgtttctacaaag

SEQ ID NO: 186970 - DNA, 25 bp, Saccharomyces pastorianus
gcagactttggagcgctgcgtaagt

SEQ ID NO: 186971 - DNA, 25 bp, Saccharomyces pastorianus
tgcactatgcacagaagcccgatca

SEQ ID NO: 186972 - DNA, 25 bp, Saccharomyces pastorianus
gaactagactatccgcgagagggca

SEQ ID NO: 186973 - DNA, 25 bp, Saccharomyces pastorianus
ggacttgttccgatcagcattacat

SEQ ID NO: 186974 - DNA, 25 bp, Saccharomyces pastorianus
aagtcgctacacacgtacattgctg

SEQ ID NO: 186975 - DNA, 25 bp, Saccharomyces pastorianus
agggcggccgaatctcgaggacaca

SEQ ID NO: 186976 - DNA, 25 bp, Saccharomyces pastorianus
aaacgcaggtgggtggccatctact

SEQ ID NO: 186977 - DNA, 25 bp, Saccharomyces pastorianus
agggcaaactgttccgcaccaagga

SEQ ID NO: 186978 - DNA, 25 bp, Saccharomyces pastorianus
cattgcaactgctcctgtaatatat

SEQ ID NO: 186979 - DNA, 25 bp, Saccharomyces pastorianus
agaggtccgaagtccattaggttga

SEQ ID NO: 186980 - DNA, 25 bp, Saccharomyces pastorianus
aaaggccgtgtagcagttgcctaca

SEQ ID NO: 186981 - DNA, 25 bp, Saccharomyces pastorianus
tgcttgcggctctatcacgataatt

SEQ ID NO: 186982 - DNA, 25 bp, Saccharomyces pastorianus
gagggttcccaaaaagctaatcgat

SEQ ID NO: 186983 - DNA, 25 bp, Saccharomyces pastorianus
gaaagcggtcctaacaccattgcaa

SEQ ID NO: 186984 - DNA, 25 bp, Saccharomyces pastorianus
gctgtcgtattcgtcgagtgaaatg

SEQ ID NO: 186985 - DNA, 25 bp, Saccharomyces pastorianus
actaagcaaacatgcgccaagcagg

SEQ ID NO: 186986 - DNA, 25 bp, Saccharomyces pastorianus
agcaggcatgcgactgctgtcgtat

SEQ ID NO: 186987 - DNA, 25 bp, Saccharomyces pastorianus
taatcgatcagtgcttgcggctcta

SEQ ID NO: 186988 - DNA, 25 bp, Saccharomyces pastorianus
gcacttatctgcaaccgtcgagaaa

SEQ ID NO: 186989 - DNA, 25 bp, Saccharomyces pastorianus
ttgatcagaataacaaagctctaag

SEQ ID NO: 186990 - DNA, 25 bp, Saccharomyces pastorianus
atgaccctgtcaacatggctaaaag

SEQ ID NO: 186991 - DNA, 25 bp, Saccharomyces pastorianus
caaaactggaagtaataatgccgac

SEQ ID NO: 186992 - DNA, 25 bp, Saccharomyces pastorianus
attggcttatgaccctgtcaacatg

SEQ ID NO: 186993 - DNA, 25 bp, Saccharomyces pastorianus
gaacacaaaaggagatctttgatca

SEQ ID NO: 186994 - DNA, 25 bp, Saccharomyces pastorianus
gatcttcattggcttatgaccctgt

SEQ ID NO: 186995 - DNA, 25 bp, Saccharomyces pastorianus
ggaggtcatgacagcaaaactggaa

SEQ ID NO: 186996 - DNA, 25 bp, Saccharomyces pastorianus
gcaagtaaggacaaggcttcgctca

SEQ ID NO: 186997 - DNA, 25 bp, Saccharomyces pastorianus
acatggctaaaaggttgagaacaca

SEQ ID NO: 186998 - DNA, 25 bp, Saccharomyces pastorianus
aggacaaggcttcgctcaataaaaa

SEQ ID NO: 186999 - DNA, 25 bp, Saccharomyces pastorianus
caaagctctaagaaagggaggtcat

SEQ ID NO: 187000 - DNA, 25 bp, Saccharomyces pastorianus
gtctgctaaactgggccatactgtg

SEQ ID NO: 187001 - DNA, 25 bp, Saccharomyces pastorianus
accatctctagcatacttagttgaa

SEQ ID NO: 187002 - DNA, 25 bp, Saccharomyces pastorianus
tctagcatacttagttgaacacgcc

SEQ ID NO: 187003 - DNA, 25 bp, Saccharomyces pastorianus
aaccatctctagcatacttagttga

SEQ ID NO: 187004 - DNA, 25 bp, Saccharomyces pastorianus
aaggagaagtctgctaaactgggcc

SEQ ID NO: 187005 - DNA, 25 bp, Saccharomyces pastorianus
gagaagtctgctaaactgggccata

SEQ ID NO: 187006 - DNA, 25 bp, Saccharomyces pastorianus
agaagtctgctaaactgggccatac

SEQ ID NO: 187007 - DNA, 25 bp, Saccharomyces pastorianus
acaaccatctctagcatacttagtt

SEQ ID NO: 187008 - DNA, 25 bp, Saccharomyces pastorianus
agtctgctaaactgggccatactgt

SEQ ID NO: 187009 - DNA, 25 bp, Saccharomyces pastorianus
catctctagcatacttagttgaaca

SEQ ID NO: 187010 - DNA, 25 bp, Saccharomyces pastorianus
tctctagcatacttagttgaacacg

SEQ ID NO: 187011 - DNA, 25 bp, Saccharomyces pastorianus
ggtcttttatatgtttcattatcct

SEQ ID NO: 187012 - DNA, 25 bp, Saccharomyces pastorianus
gcctgcaggtcttttatatgtttca

SEQ ID NO: 187013 - DNA, 25 bp, Saccharomyces pastorianus
tcttttatatgtttcattatcctat

SEQ ID NO: 187014 - DNA, 25 bp, Saccharomyces pastorianus
gcaggtcttttatatgtttcattat

SEQ ID NO: 187015 - DNA, 25 bp, Saccharomyces pastorianus
gtcttttatatgtttcattatccta

SEQ ID NO: 187016 - DNA, 25 bp, Saccharomyces pastorianus
aggtcttttatatgtttcattatcc

SEQ ID NO: 187017 - DNA, 25 bp, Saccharomyces pastorianus
caggtcttttatatgtttcattatc

SEQ ID NO: 187018 - DNA, 25 bp, Saccharomyces pastorianus
cctgcaggtcttttatatgtttcat

SEQ ID NO: 187019 - DNA, 25 bp, Saccharomyces pastorianus
ctgcaggtcttttatatgtttcatt

SEQ ID NO: 187020 - DNA, 25 bp, Saccharomyces pastorianus
tgcaggtcttttatatgtttcatta

SEQ ID NO: 187021 - DNA, 25 bp, Saccharomyces pastorianus
cttttatatgtttcattatcctatt

SEQ ID NO: 187022 - DNA, 25 bp, Saccharomyces pastorianus
tagagggaccctttgttttttcatg

SEQ ID NO: 187023 - DNA, 25 bp, Saccharomyces pastorianus
taacgttacgagtttctggcgtgaa

SEQ ID NO: 187024 - DNA, 25 bp, Saccharomyces pastorianus
gagcatttgctgaaggtggatccca

SEQ ID NO: 187025 - DNA, 25 bp, Saccharomyces pastorianus
gccatttgtgcagtatggtttgcaa

SEQ ID NO: 187026 - DNA, 25 bp, Saccharomyces pastorianus
cgttgtctcgtttcaccttgataga

SEQ ID NO: 187027 - DNA, 25 bp, Saccharomyces pastorianus
gtttcaccttgatagagggaccctt

SEQ ID NO: 187028 - DNA, 25 bp, Saccharomyces pastorianus
aaattgcggtagctgccatttgtgc

SEQ ID NO: 187029 - DNA, 25 bp, Saccharomyces pastorianus
aaggtggatcccatccccgatgtga

SEQ ID NO: 187030 - DNA, 25 bp, Saccharomyces pastorianus
actttgggcatcgtgtccgttttgg

SEQ ID NO: 187031 - DNA, 25 bp, Saccharomyces pastorianus
gcatcgtgtccgttttggtattata

SEQ ID NO: 187032 - DNA, 25 bp, Saccharomyces pastorianus
aaaactcctttgtagcgttgtctcg

SEQ ID NO: 187033 - DNA, 25 bp, Saccharomyces pastorianus
gatcgggccaaacttctgaactgat

SEQ ID NO: 187034 - DNA, 25 bp, Saccharomyces pastorianus
caaaattccttctctgatgtctcta

SEQ ID NO: 187035 - DNA, 25 bp, Saccharomyces pastorianus
attatgcgggtttaagatcgggcca

SEQ ID NO: 187036 - DNA, 25 bp, Saccharomyces pastorianus
taaatgttgcgcctttacgccttca

SEQ ID NO: 187037 - DNA, 25 bp, Saccharomyces pastorianus
tggacctggaatttatccggccggt

SEQ ID NO: 187038 - DNA, 25 bp, Saccharomyces pastorianus
ttacgccttcacgtggatcaagaca

SEQ ID NO: 187039 - DNA, 25 bp, Saccharomyces pastorianus
acagttctccgatgtttcttctgga

SEQ ID NO: 187040 - DNA, 25 bp, Saccharomyces pastorianus
gatgaacccgatgagtctaactctg

SEQ ID NO: 187041 - DNA, 25 bp, Saccharomyces pastorianus
ggccggtcgactttttgcaagcagt

SEQ ID NO: 187042 - DNA, 25 bp, Saccharomyces pastorianus
attatcgataatgttcccacgtccg

SEQ ID NO: 187043 - DNA, 25 bp, Saccharomyces pastorianus
gaaccgatgtgtagtttccatttac

SEQ ID NO: 187044 - DNA, 25 bp, Saccharomyces pastorianus
gtgatgaggaaagcgacacgtgcat

SEQ ID NO: 187045 - DNA, 25 bp, Saccharomyces pastorianus
agtaccaatacgactaccaactcca

SEQ ID NO: 187046 - DNA, 25 bp, Saccharomyces pastorianus
tgccagtaccaatacgactaccaac

SEQ ID NO: 187047 - DNA, 25 bp, Saccharomyces pastorianus
gctaatgccagtaccaatacgacta

SEQ ID NO: 187048 - DNA, 25 bp, Saccharomyces pastorianus
ctaatgccagtaccaatacgactac

SEQ ID NO: 187049 - DNA, 25 bp, Saccharomyces pastorianus
taatgccagtaccaatacgactacc

SEQ ID NO: 187050 - DNA, 25 bp, Saccharomyces pastorianus
aatgccagtaccaatacgactacca

SEQ ID NO: 187051 - DNA, 25 bp, Saccharomyces pastorianus
gccagtaccaatacgactaccaact

SEQ ID NO: 187052 - DNA, 25 bp, Saccharomyces pastorianus
atgccagtaccaatacgactaccaa

SEQ ID NO: 187053 - DNA, 25 bp, Saccharomyces pastorianus
tgctaatgccagtaccaatacgact

SEQ ID NO: 187054 - DNA, 25 bp, Saccharomyces pastorianus
gtaccaatacgactaccaactccag

SEQ ID NO: 187055 - DNA, 25 bp, Saccharomyces pastorianus
gatttgttaccccaggctgaagcac

SEQ ID NO: 187056 - DNA, 25 bp, Saccharomyces pastorianus
gaagcaccaccccaagtagaagtag

SEQ ID NO: 187057 - DNA, 25 bp, Saccharomyces pastorianus
gtcataccaccgctaagaccagaag

SEQ ID NO: 187058 - DNA, 25 bp, Saccharomyces pastorianus
gtggaagcaccaccccatgaggaga

SEQ ID NO: 187059 - DNA, 25 bp, Saccharomyces pastorianus
tgaggagacaccaccaccacctgag

SEQ ID NO: 187060 - DNA, 25 bp, Saccharomyces pastorianus
tgcaccgccccaacttgatttgtta

SEQ ID NO: 187061 - DNA, 25 bp, Saccharomyces pastorianus
agaagtagcaccagtaccttggccg

SEQ ID NO: 187062 - DNA, 25 bp, Saccharomyces pastorianus
aagcggatgcacctccattaccttg

SEQ ID NO: 187063 - DNA, 25 bp, Saccharomyces pastorianus
gaaggagctccatcctggtgtcata

SEQ ID NO: 187064 - DNA, 25 bp, Saccharomyces pastorianus
gtgttttgccaccatcgaaggagct

SEQ ID NO: 187065 - DNA, 25 bp, Saccharomyces pastorianus
catgcgcatttacagctggtgtttt

SEQ ID NO: 187066 - DNA, 25 bp, Saccharomyces pastorianus
gggcggtgtcgtgtacacaattaca

SEQ ID NO: 187067 - DNA, 25 bp, Saccharomyces pastorianus
caccttgctgagtgagtacgcatat

SEQ ID NO: 187068 - DNA, 25 bp, Saccharomyces pastorianus
aatgtcttgagaggtaacgctatga

SEQ ID NO: 187069 - DNA, 25 bp, Saccharomyces pastorianus
gtgtacacaattacagacgtcaaag

SEQ ID NO: 187070 - DNA, 25 bp, Saccharomyces pastorianus
ggaacaatacagcttcaaaacatgg

SEQ ID NO: 187071 - DNA, 25 bp, Saccharomyces pastorianus
gacgtcaaagacctgcatgagtgga

SEQ ID NO: 187072 - DNA, 25 bp, Saccharomyces pastorianus
ggatagaattattgccttaaggaac

SEQ ID NO: 187073 - DNA, 25 bp, Saccharomyces pastorianus
gaagagcatcctttatttgaacggt

SEQ ID NO: 187074 - DNA, 25 bp, Saccharomyces pastorianus
tttgtttccccgatcctcatttcaa

SEQ ID NO: 187075 - DNA, 25 bp, Saccharomyces pastorianus
gaaaagggccagctttctaaaatgt

SEQ ID NO: 187076 - DNA, 25 bp, Saccharomyces pastorianus
ccccgatcctcatttcaaacaaaga

SEQ ID NO: 187077 - DNA, 25 bp, Saccharomyces pastorianus
aactgggccaagagaccaagaactt

SEQ ID NO: 187078 - DNA, 25 bp, Saccharomyces pastorianus
caactgggccaagagaccaagaact

SEQ ID NO: 187079 - DNA, 25 bp, Saccharomyces pastorianus
ccaactgggccaagagaccaagaac

SEQ ID NO: 187080 - DNA, 25 bp, Saccharomyces pastorianus
cccgcgttattagcacggtgcctta

SEQ ID NO: 187081 - DNA, 25 bp, Saccharomyces pastorianus
tattagcacggtgccttaaccaact

SEQ ID NO: 187082 - DNA, 25 bp, Saccharomyces pastorianus
aaccaactgggccaagagaccaaga

SEQ ID NO: 187083 - DNA, 25 bp, Saccharomyces pastorianus
accaactgggccaagagaccaagaa

SEQ ID NO: 187084 - DNA, 25 bp, Saccharomyces pastorianus
cgcgttattagcacggtgccttaac

SEQ ID NO: 187085 - DNA, 25 bp, Saccharomyces pastorianus
actgggccaagagaccaagaacttg

SEQ ID NO: 187086 - DNA, 25 bp, Saccharomyces pastorianus
gttattagcacggtgccttaaccaa

SEQ ID NO: 187087 - DNA, 25 bp, Saccharomyces pastorianus
ccgcgttattagcacggtgccttaa

SEQ ID NO: 187088 - DNA, 25 bp, Saccharomyces pastorianus
gagctggttattcaaatttctaaaa

SEQ ID NO: 187089 - DNA, 25 bp, Saccharomyces pastorianus
gtgactacctattatggtccgaata

SEQ ID NO: 187090 - DNA, 25 bp, Saccharomyces pastorianus
gaaattttatgaccaacgcattgaa

SEQ ID NO: 187091 - DNA, 25 bp, Saccharomyces pastorianus
atcaatgctttcttaatggatacat

SEQ ID NO: 187092 - DNA, 25 bp, Saccharomyces pastorianus
gtgccattacaagttttttgtcagt

SEQ ID NO: 187093 - DNA, 25 bp, Saccharomyces pastorianus
aaacttgctaaaacagtgccattac

SEQ ID NO: 187094 - DNA, 25 bp, Saccharomyces pastorianus
ggtccgaataaaatcaatgctttct

SEQ ID NO: 187095 - DNA, 25 bp, Saccharomyces pastorianus
ggatacatttatcttaaacttgcta

SEQ ID NO: 187096 - DNA, 25 bp, Saccharomyces pastorianus
tcgattgtgacttagtcattctgct

SEQ ID NO: 187097 - DNA, 25 bp, Saccharomyces pastorianus
gatggtattggtctagaacttttag

SEQ ID NO: 187098 - DNA, 25 bp, Saccharomyces pastorianus
gtcagtaatatctctgagctggtta

SEQ ID NO: 187099 - DNA, 25 bp, Saccharomyces pastorianus
atgttctaaacaccttgagcgatat

SEQ ID NO: 187100 - DNA, 25 bp, Saccharomyces pastorianus
agtccagactgtcagaaccatggtt

SEQ ID NO: 187101 - DNA, 25 bp, Saccharomyces pastorianus
gaatactttctctgagctgttggtt

SEQ ID NO: 187102 - DNA, 25 bp, Saccharomyces pastorianus
gcagagaacgtttttcaagacttaa

SEQ ID NO: 187103 - DNA, 25 bp, Saccharomyces pastorianus
tttaccatctgtgtcgttaaccgag

SEQ ID NO: 187104 - DNA, 25 bp, Saccharomyces pastorianus
gtttccaattaagtgcatccgctgt

SEQ ID NO: 187105 - DNA, 25 bp, Saccharomyces pastorianus
ggatacttttcagccatttttaact

SEQ ID NO: 187106 - DNA, 25 bp, Saccharomyces pastorianus
accatggttgatgactggaacttca

SEQ ID NO: 187107 - DNA, 25 bp, Saccharomyces pastorianus
ttatttacaaacttcctgacagatg

SEQ ID NO: 187108 - DNA, 25 bp, Saccharomyces pastorianus
gctgttggttccctacctgttaaag

SEQ ID NO: 187109 - DNA, 25 bp, Saccharomyces pastorianus
taagtgcatccgctgttagtgaaat

SEQ ID NO: 187110 - DNA, 25 bp, Saccharomyces pastorianus
aacgccgcctcaaacatgctgggaa

SEQ ID NO: 187111 - DNA, 25 bp, Saccharomyces pastorianus
gatccatatttcaacgcatctcaaa

SEQ ID NO: 187112 - DNA, 25 bp, Saccharomyces pastorianus
atatttcaacgcatctcaaatgggt

SEQ ID NO: 187113 - DNA, 25 bp, Saccharomyces pastorianus
gatgtcgggtgctgagcaagatcca

SEQ ID NO: 187114 - DNA, 25 bp, Saccharomyces pastorianus
gcctcaaacatgctgggaaccaacg

SEQ ID NO: 187115 - DNA, 25 bp, Saccharomyces pastorianus
gtcaatttcgcatcgggcgataaca

SEQ ID NO: 187116 - DNA, 25 bp, Saccharomyces pastorianus
gataaagtcaatttcgcatcgggcg

SEQ ID NO: 187117 - DNA, 25 bp, Saccharomyces pastorianus
gggtgctgagcaagatccatatttc

SEQ ID NO: 187118 - DNA, 25 bp, Saccharomyces pastorianus
tgctgggaaccaacgaagacgtgat

SEQ ID NO: 187119 - DNA, 25 bp, Saccharomyces pastorianus
atcgggcgataacaacgccgcctca

SEQ ID NO: 187120 - DNA, 25 bp, Saccharomyces pastorianus
caacgaagacgtgatgatgtcgggt

SEQ ID NO: 187121 - DNA, 25 bp, Saccharomyces pastorianus
gtggttgtccaagcaagagtggcaa

SEQ ID NO: 187122 - DNA, 25 bp, Saccharomyces pastorianus
tccaagcaagagtggcaagaaagtg

SEQ ID NO: 187123 - DNA, 25 bp, Saccharomyces pastorianus
tgtggttgtccaagcaagagtggca

SEQ ID NO: 187124 - DNA, 25 bp, Saccharomyces pastorianus
atgtggttgtccaagcaagagtggc

SEQ ID NO: 187125 - DNA, 25 bp, Saccharomyces pastorianus
caagcaagagtggcaagaaagtggg

SEQ ID NO: 187126 - DNA, 25 bp, Saccharomyces pastorianus
gttgtccaagcaagagtggcaagaa

SEQ ID NO: 187127 - DNA, 25 bp, Saccharomyces pastorianus
tggttgtccaagcaagagtggcaag

SEQ ID NO: 187128 - DNA, 25 bp, Saccharomyces pastorianus
ttgtccaagcaagagtggcaagaaa

SEQ ID NO: 187129 - DNA, 25 bp, Saccharomyces pastorianus
ccaagcaagagtggcaagaaagtgg

SEQ ID NO: 187130 - DNA, 25 bp, Saccharomyces pastorianus
gtccaagcaagagtggcaagaaagt

SEQ ID NO: 187131 - DNA, 25 bp, Saccharomyces pastorianus
ggttgtccaagcaagagtggcaaga

SEQ ID NO: 187132 - DNA, 25 bp, Saccharomyces pastorianus
atactgggaccaccagatgatgacg

SEQ ID NO: 187133 - DNA, 25 bp, Saccharomyces pastorianus
gggtcttcatactgggaccaccaga

SEQ ID NO: 187134 - DNA, 25 bp, Saccharomyces pastorianus
agatacagggaatgacagtgacagt

SEQ ID NO: 187135 - DNA, 25 bp, Saccharomyces pastorianus
ggaacaactgtgtttatccacggaa

SEQ ID NO: 187136 - DNA, 25 bp, Saccharomyces pastorianus
gacagtaatggtggcggtcaattga

SEQ ID NO: 187137 - DNA, 25 bp, Saccharomyces pastorianus
gatcaacgttgagtctttagaggaa

SEQ ID NO: 187138 - DNA, 25 bp, Saccharomyces pastorianus
gaagacgttgataacaagaacacag

SEQ ID NO: 187139 - DNA, 25 bp, Saccharomyces pastorianus
cggaatcagatttacacaacaagtt

SEQ ID NO: 187140 - DNA, 25 bp, Saccharomyces pastorianus
ggtggcggtcaattgatcaacgttg

SEQ ID NO: 187141 - DNA, 25 bp, Saccharomyces pastorianus
gaaatgtttgattcagatacaggga

SEQ ID NO: 187142 - DNA, 25 bp, Saccharomyces pastorianus
aactgtgtttatccacggaatcaga

SEQ ID NO: 187143 - DNA, 25 bp, Saccharomyces pastorianus
gggaatgtcttagaagcctttcagg

SEQ ID NO: 187144 - DNA, 25 bp, Saccharomyces pastorianus
gaaaatcatccggaatacctggaaa

SEQ ID NO: 187145 - DNA, 25 bp, Saccharomyces pastorianus
gacgcatgtaaccactagattcttg

SEQ ID NO: 187146 - DNA, 25 bp, Saccharomyces pastorianus
gctttccttacatgagtctctattg

SEQ ID NO: 187147 - DNA, 25 bp, Saccharomyces pastorianus
atgtctccactatttcagcgtacga

SEQ ID NO: 187148 - DNA, 25 bp, Saccharomyces pastorianus
gaaagtttaccttctctgaaattca

SEQ ID NO: 187149 - DNA, 25 bp, Saccharomyces pastorianus
aagcctttcaggatgcattcttaaa

SEQ ID NO: 187150 - DNA, 25 bp, Saccharomyces pastorianus
atattgcagcgaacgtcatttacaa

SEQ ID NO: 187151 - DNA, 25 bp, Saccharomyces pastorianus
aacaaacgccgaatccaaggatagc

SEQ ID NO: 187152 - DNA, 25 bp, Saccharomyces pastorianus
gacagagtcacatccaaatttcaag

SEQ ID NO: 187153 - DNA, 25 bp, Saccharomyces pastorianus
gacattgtcatgcatacctggctca

SEQ ID NO: 187154 - DNA, 25 bp, Saccharomyces pastorianus
agatgattatctggtctctgattca

SEQ ID NO: 187155 - DNA, 25 bp, Saccharomyces pastorianus
ctggtctctgattcacttgtaagga

SEQ ID NO: 187156 - DNA, 25 bp, Saccharomyces pastorianus
atgattatctggtctctgattcact

SEQ ID NO: 187157 - DNA, 25 bp, Saccharomyces pastorianus
gatgattatctggtctctgattcac

SEQ ID NO: 187158 - DNA, 25 bp, Saccharomyces pastorianus
atctggtctctgattcacttgtaag

SEQ ID NO: 187159 - DNA, 25 bp, Saccharomyces pastorianus
gattatctggtctctgattcacttg

SEQ ID NO: 187160 - DNA, 25 bp, Saccharomyces pastorianus
ttatctggtctctgattcacttgta

SEQ ID NO: 187161 - DNA, 25 bp, Saccharomyces pastorianus
tctggtctctgattcacttgtaagg

SEQ ID NO: 187162 - DNA, 25 bp, Saccharomyces pastorianus
ctctgattcacttgtaaggacttgt

SEQ ID NO: 187163 - DNA, 25 bp, Saccharomyces pastorianus
ggtctctgattcacttgtaaggact

SEQ ID NO: 187164 - DNA, 25 bp, Saccharomyces pastorianus
tatctggtctctgattcacttgtaa

SEQ ID NO: 187165 - DNA, 25 bp, Saccharomyces pastorianus
tgaccaattcaaaggcgtacgccgt

SEQ ID NO: 187166 - DNA, 25 bp, Saccharomyces pastorianus
aattgccaccacgacaagtattcct

SEQ ID NO: 187167 - DNA, 25 bp, Saccharomyces pastorianus
gtcaaatcctcagaacacttacgtg

SEQ ID NO: 187168 - DNA, 25 bp, Saccharomyces pastorianus
gaaaatcttaaccaggtcggtgatg

SEQ ID NO: 187169 - DNA, 25 bp, Saccharomyces pastorianus
gctatctttggctatcgaaccgtta

SEQ ID NO: 187170 - DNA, 25 bp, Saccharomyces pastorianus
gatatcgtcatcaatgccaacgtgg

SEQ ID NO: 187171 - DNA, 25 bp, Saccharomyces pastorianus
gagatgtgccagagaggcccaatat

SEQ ID NO: 187172 - DNA, 25 bp, Saccharomyces pastorianus
tacgccgttactacattacctcaag

SEQ ID NO: 187173 - DNA, 25 bp, Saccharomyces pastorianus
gaggcccaatatttcttcgaggatt

SEQ ID NO: 187174 - DNA, 25 bp, Saccharomyces pastorianus
tttgaccctggtgaagagatgtgcc

SEQ ID NO: 187175 - DNA, 25 bp, Saccharomyces pastorianus
gtattcctctgaaccaattctactt

SEQ ID NO: 187176 - DNA, 25 bp, Saccharomyces pastorianus
gactcagtatattctaaaccggtta

SEQ ID NO: 187177 - DNA, 25 bp, Saccharomyces pastorianus
tatattacatccctgcattcttcca

SEQ ID NO: 187178 - DNA, 25 bp, Saccharomyces pastorianus
gaattgggcgccattgaacaacttt

SEQ ID NO: 187179 - DNA, 25 bp, Saccharomyces pastorianus
tacactctaaattcttgacggactt

SEQ ID NO: 187180 - DNA, 25 bp, Saccharomyces pastorianus
tatttgccgcagacacttctattgt

SEQ ID NO: 187181 - DNA, 25 bp, Saccharomyces pastorianus
aaccggttaaagtagctctcatatt

SEQ ID NO: 187182 - DNA, 25 bp, Saccharomyces pastorianus
tagtatctttactcgaccacgtatc

SEQ ID NO: 187183 - DNA, 25 bp, Saccharomyces pastorianus
gattagttcccaaacagcttcttga

SEQ ID NO: 187184 - DNA, 25 bp, Saccharomyces pastorianus
gagggctgacatgatggacttcaaa

SEQ ID NO: 187185 - DNA, 25 bp, Saccharomyces pastorianus
acttctgcggtagaattgggcgcca

SEQ ID NO: 187186 - DNA, 25 bp, Saccharomyces pastorianus
tcttccatctattcgcatctttgag

SEQ ID NO: 187187 - DNA, 25 bp, Saccharomyces pastorianus
ttgttgctgtgacatttgctgctgt

SEQ ID NO: 187188 - DNA, 25 bp, Saccharomyces pastorianus
gtgacatttgttgctgtgacatttg

SEQ ID NO: 187189 - DNA, 25 bp, Saccharomyces pastorianus
ctgtgacatttgctgctgtggttgt

SEQ ID NO: 187190 - DNA, 25 bp, Saccharomyces pastorianus
ctgtgacatttgttgctgtgacatt

SEQ ID NO: 187191 - DNA, 25 bp, Saccharomyces pastorianus
gacatttgttgctgtgacatttgct

SEQ ID NO: 187192 - DNA, 25 bp, Saccharomyces pastorianus
gttgctgtgacatttgctgctgtgg

SEQ ID NO: 187193 - DNA, 25 bp, Saccharomyces pastorianus
tttgttgctgtgacatttgctgctg

SEQ ID NO: 187194 - DNA, 25 bp, Saccharomyces pastorianus
tgtggtcgaggatgctgtgacattt

SEQ ID NO: 187195 - DNA, 25 bp, Saccharomyces pastorianus
tgctgtgacatttgttgctgtgaca

SEQ ID NO: 187196 - DNA, 25 bp, Saccharomyces pastorianus
tgctgtgacatttgctgctgtggtt

SEQ ID NO: 187197 - DNA, 25 bp, Saccharomyces pastorianus
catttgttgctgtgacatttgctgc

SEQ ID NO: 187198 - DNA, 25 bp, Saccharomyces pastorianus
tgaagataatcctatcgaatcgctc

SEQ ID NO: 187199 - DNA, 25 bp, Saccharomyces pastorianus
ctgaggcagctcttttgaaattggc

SEQ ID NO: 187200 - DNA, 25 bp, Saccharomyces pastorianus
gacgacattggcttgataagtgagt

SEQ ID NO: 187201 - DNA, 25 bp, Saccharomyces pastorianus
gacgtggacgacattggcttgataa

SEQ ID NO: 187202 - DNA, 25 bp, Saccharomyces pastorianus
gtgagttttttcttacagaatttgt

SEQ ID NO: 187203 - DNA, 25 bp, Saccharomyces pastorianus
aattggccagggacgtggacgacat

SEQ ID NO: 187204 - DNA, 25 bp, Saccharomyces pastorianus
aagatactgaggcagctcttttgaa

SEQ ID NO: 187205 - DNA, 25 bp, Saccharomyces pastorianus
aggcagctcttttgaaattggccag

SEQ ID NO: 187206 - DNA, 25 bp, Saccharomyces pastorianus
cagaatttgttgtgttggatgaaga

SEQ ID NO: 187207 - DNA, 25 bp, Saccharomyces pastorianus
ggatatactggaagatactgaggca

SEQ ID NO: 187208 - DNA, 25 bp, Saccharomyces pastorianus
gataagtgagttttttcttacagaa

SEQ ID NO: 187209 - DNA, 25 bp, Saccharomyces pastorianus
cagtttgtatgcatttgacctgtac

SEQ ID NO: 187210 - DNA, 25 bp, Saccharomyces pastorianus
attttggctcttcgaggtgacccac

SEQ ID NO: 187211 - DNA, 25 bp, Saccharomyces pastorianus
ggtggtactactgcggaaaagactc

SEQ ID NO: 187212 - DNA, 25 bp, Saccharomyces pastorianus
attggctagattctcaatcgaacga

SEQ ID NO: 187213 - DNA, 25 bp, Saccharomyces pastorianus
cttccttggcacagcagacactaaa

SEQ ID NO: 187214 - DNA, 25 bp, Saccharomyces pastorianus
atccactgtttatcacggttacttg

SEQ ID NO: 187215 - DNA, 25 bp, Saccharomyces pastorianus
gaacgaatcaccttttaaatatgcg

SEQ ID NO: 187216 - DNA, 25 bp, Saccharomyces pastorianus
caggaatcaggaatattttggctct

SEQ ID NO: 187217 - DNA, 25 bp, Saccharomyces pastorianus
gatttatatcatgcgagggcttccc

SEQ ID NO: 187218 - DNA, 25 bp, Saccharomyces pastorianus
agaattcttccctccaaagactgaa

SEQ ID NO: 187219 - DNA, 25 bp, Saccharomyces pastorianus
gtatgactgctttagatccactgtt

SEQ ID NO: 187220 - DNA, 25 bp, Saccharomyces pastorianus
aacttgcttggatagctcatctacg

SEQ ID NO: 187221 - DNA, 25 bp, Saccharomyces pastorianus
ccacgtaaacttgcttggatagctc

SEQ ID NO: 187222 - DNA, 25 bp, Saccharomyces pastorianus
gccacgtaaacttgcttggatagct

SEQ ID NO: 187223 - DNA, 25 bp, Saccharomyces pastorianus
taaacttgcttggatagctcatcta

SEQ ID NO: 187224 - DNA, 25 bp, Saccharomyces pastorianus
aaacttgcttggatagctcatctac

SEQ ID NO: 187225 - DNA, 25 bp, Saccharomyces pastorianus
ttcgccacgtaaacttgcttggata

SEQ ID NO: 187226 - DNA, 25 bp, Saccharomyces pastorianus
gtaaacttgcttggatagctcatct

SEQ ID NO: 187227 - DNA, 25 bp, Saccharomyces pastorianus
cgccacgtaaacttgcttggatagc

SEQ ID NO: 187228 - DNA, 25 bp, Saccharomyces pastorianus
cgtaaacttgcttggatagctcatc

SEQ ID NO: 187229 - DNA, 25 bp, Saccharomyces pastorianus
acgtaaacttgcttggatagctcat

SEQ ID NO: 187230 - DNA, 25 bp, Saccharomyces pastorianus
tcgccacgtaaacttgcttggatag

SEQ ID NO: 187231 - DNA, 25 bp, Saccharomyces pastorianus
agaaggtatcccatggacgtttcaa

SEQ ID NO: 187232 - DNA, 25 bp, Saccharomyces pastorianus
ggtatcccatggacgtttcaaaatg

SEQ ID NO: 187233 - DNA, 25 bp, Saccharomyces pastorianus
aaattgaacaagctcttgcccaggg

SEQ ID NO: 187234 - DNA, 25 bp, Saccharomyces pastorianus
ggtcatttaacatttgaaaactcaa

SEQ ID NO: 187235 - DNA, 25 bp, Saccharomyces pastorianus
gcaagtcgtcggatatagaaggtat

SEQ ID NO: 187236 - DNA, 25 bp, Saccharomyces pastorianus
gatacaggtaccaaagaaccaacga

SEQ ID NO: 187237 - DNA, 25 bp, Saccharomyces pastorianus
atgcccttattaaatctttcgttga

SEQ ID NO: 187238 - DNA, 25 bp, Saccharomyces pastorianus
catggacgtttcaaaatggtcattt

SEQ ID NO: 187239 - DNA, 25 bp, Saccharomyces pastorianus
tgattttataatccccctaacaata

SEQ ID NO: 187240 - DNA, 25 bp, Saccharomyces pastorianus
gataatttttcatataaaccggtag

SEQ ID NO: 187241 - DNA, 25 bp, Saccharomyces pastorianus
aaaccggtagagaatgacattgaga

SEQ ID NO: 187242 - DNA, 25 bp, Saccharomyces pastorianus
gcaactgcctttcatacccaaaaaa

SEQ ID NO: 187243 - DNA, 25 bp, Saccharomyces pastorianus
aaaaatcatggtctgtggtgatgca

SEQ ID NO: 187244 - DNA, 25 bp, Saccharomyces pastorianus
aatctaccggtgtattccgcttata

SEQ ID NO: 187245 - DNA, 25 bp, Saccharomyces pastorianus
gaaagaagcaggaccggaaatctac

SEQ ID NO: 187246 - DNA, 25 bp, Saccharomyces pastorianus
gcatgagctcataggaaacaacaat

SEQ ID NO: 187247 - DNA, 25 bp, Saccharomyces pastorianus
cggtgtattccgcttataaaaatgg

SEQ ID NO: 187248 - DNA, 25 bp, Saccharomyces pastorianus
attcaactaagaaatgacttgcagg

SEQ ID NO: 187249 - DNA, 25 bp, Saccharomyces pastorianus
aagacctactacgtggaaagaagca

SEQ ID NO: 187250 - DNA, 25 bp, Saccharomyces pastorianus
gacttgcaggagcaactgcctttca

SEQ ID NO: 187251 - DNA, 25 bp, Saccharomyces pastorianus
aggtaacaaaattatcacggagatc

SEQ ID NO: 187252 - DNA, 25 bp, Saccharomyces pastorianus
aattattatcaagggcaatgcagta

SEQ ID NO: 187253 - DNA, 25 bp, Saccharomyces pastorianus
ctattgaagatccatttgccgaaga

SEQ ID NO: 187254 - DNA, 25 bp, Saccharomyces pastorianus
tgaagaagtacccaattgtctctat

SEQ ID NO: 187255 - DNA, 25 bp, Saccharomyces pastorianus
atggctgcctccagagctgctgccg

SEQ ID NO: 187256 - DNA, 25 bp, Saccharomyces pastorianus
aagtacccaattgtctctattgaag

SEQ ID NO: 187257 - DNA, 25 bp, Saccharomyces pastorianus
gtacccaattgtctctattgaagat

SEQ ID NO: 187258 - DNA, 25 bp, Saccharomyces pastorianus
gaagtacccaattgtctctattgaa

SEQ ID NO: 187259 - DNA, 25 bp, Saccharomyces pastorianus
gtctctattgaagatccatttgccg

SEQ ID NO: 187260 - DNA, 25 bp, Saccharomyces pastorianus
ctctattgaagatccatttgccgaa

SEQ ID NO: 187261 - DNA, 25 bp, Saccharomyces pastorianus
gaagaagtacccaattgtctctatt

SEQ ID NO: 187262 - DNA, 25 bp, Saccharomyces pastorianus
tattgaagatccatttgccgaagat

SEQ ID NO: 187263 - DNA, 25 bp, Saccharomyces pastorianus
ctgcctccagagctgctgccgctga

SEQ ID NO: 187264 - DNA, 25 bp, Saccharomyces pastorianus
ggcggttatttgcattctcattcac

SEQ ID NO: 187265 - DNA, 25 bp, Saccharomyces pastorianus
gatgtcggcattggctccattatca

SEQ ID NO: 187266 - DNA, 25 bp, Saccharomyces pastorianus
gatgtttttcattgcagctgcagtc

SEQ ID NO: 187267 - DNA, 25 bp, Saccharomyces pastorianus
tgttggacgccccattgatgttttt

SEQ ID NO: 187268 - DNA, 25 bp, Saccharomyces pastorianus
tgggttggtcttttcacggttacat

SEQ ID NO: 187269 - DNA, 25 bp, Saccharomyces pastorianus
aagtcttccaagtccatcttcaaag

SEQ ID NO: 187270 - DNA, 25 bp, Saccharomyces pastorianus
ggtcttcttttatatccacttccaa

SEQ ID NO: 187271 - DNA, 25 bp, Saccharomyces pastorianus
aactcgctcaatgcttacaagtcct

SEQ ID NO: 187272 - DNA, 25 bp, Saccharomyces pastorianus
attgctcttggtatggcatcttcat

SEQ ID NO: 187273 - DNA, 25 bp, Saccharomyces pastorianus
aagtccttgcttgctactggtattg

SEQ ID NO: 187274 - DNA, 25 bp, Saccharomyces pastorianus
gcaagcttcttttcgcctgaattta

SEQ ID NO: 187275 - DNA, 25 bp, Saccharomyces pastorianus
aaggcgccactgataccatccaaat

SEQ ID NO: 187276 - DNA, 25 bp, Saccharomyces pastorianus
tgttttgaaaagtacccgcctggcg

SEQ ID NO: 187277 - DNA, 25 bp, Saccharomyces pastorianus
gcccgtattattgccgcgcttcaag

SEQ ID NO: 187278 - DNA, 25 bp, Saccharomyces pastorianus
gtcactgaggacgagttgcatgcac

SEQ ID NO: 187279 - DNA, 25 bp, Saccharomyces pastorianus
aacttccgtggcatctttgcagcac

SEQ ID NO: 187280 - DNA, 25 bp, Saccharomyces pastorianus
ggacgagttgcatgcacgcgttcat

SEQ ID NO: 187281 - DNA, 25 bp, Saccharomyces pastorianus
gtgcacgtgcactgttttgaaaagt

SEQ ID NO: 187282 - DNA, 25 bp, Saccharomyces pastorianus
atccaaatgccatgggtgcacgtgc

SEQ ID NO: 187283 - DNA, 25 bp, Saccharomyces pastorianus
tttgcagcacacaccaaaggcgcca

SEQ ID NO: 187284 - DNA, 25 bp, Saccharomyces pastorianus
atgcacgcgttcatgcccgtattat

SEQ ID NO: 187285 - DNA, 25 bp, Saccharomyces pastorianus
cgcctggcgaccaagtcactgagga

SEQ ID NO: 187286 - DNA, 25 bp, Saccharomyces pastorianus
aactgtaccagtgaaaattgaagac

SEQ ID NO: 187287 - DNA, 25 bp, Saccharomyces pastorianus
ctttatttatcgttcgcggatatca

SEQ ID NO: 187288 - DNA, 25 bp, Saccharomyces pastorianus
gttgtattttcctcgtactggcaaa

SEQ ID NO: 187289 - DNA, 25 bp, Saccharomyces pastorianus
cttattctttatttatcgttcgcgg

SEQ ID NO: 187290 - DNA, 25 bp, Saccharomyces pastorianus
tccaaaactcaagaactgtaccagt

SEQ ID NO: 187291 - DNA, 25 bp, Saccharomyces pastorianus
acggtgatcttactttgcttattct

SEQ ID NO: 187292 - DNA, 25 bp, Saccharomyces pastorianus
tcctcgtactggcaaaaagtttcca

SEQ ID NO: 187293 - DNA, 25 bp, Saccharomyces pastorianus
ggtcatatcctttatcctggttgta

SEQ ID NO: 187294 - DNA, 25 bp, Saccharomyces pastorianus
tttcggtcatatcctttatcctggt

SEQ ID NO: 187295 - DNA, 25 bp, Saccharomyces pastorianus
gcggatatcaaatattttcggtcat

SEQ ID NO: 187296 - DNA, 25 bp, Saccharomyces pastorianus
tatcctggttgtattttcctcgtac

SEQ ID NO: 187297 - DNA, 25 bp, Saccharomyces pastorianus
gaactctggcatgaaagagatcatt

SEQ ID NO: 187298 - DNA, 25 bp, Saccharomyces pastorianus
gagtacctcacggattttagattta

SEQ ID NO: 187299 - DNA, 25 bp, Saccharomyces pastorianus
cttacatttcgtatttaaagcgcaa

SEQ ID NO: 187300 - DNA, 25 bp, Saccharomyces pastorianus
ggcagaagatgaactctggcatgaa

SEQ ID NO: 187301 - DNA, 25 bp, Saccharomyces pastorianus
agcgcaagaggaaaaatatacgact

SEQ ID NO: 187302 - DNA, 25 bp, Saccharomyces pastorianus
gatttaaatcttgatcaacctttgg

SEQ ID NO: 187303 - DNA, 25 bp, Saccharomyces pastorianus
atgttcaacttcgtgagtacctcac

SEQ ID NO: 187304 - DNA, 25 bp, Saccharomyces pastorianus
caacctttggcagaagatgaactct

SEQ ID NO: 187305 - DNA, 25 bp, Saccharomyces pastorianus
aatcttgatcaacctttggcagaag

SEQ ID NO: 187306 - DNA, 25 bp, Saccharomyces pastorianus
agagatcattcttacatttcgtatt

SEQ ID NO: 187307 - DNA, 25 bp, Saccharomyces pastorianus
atttcgtatttaaagcgcaagagga

SEQ ID NO: 187308 - DNA, 25 bp, Saccharomyces pastorianus
ttccctgtatatatcaatcgcggta

SEQ ID NO: 187309 - DNA, 25 bp, Saccharomyces pastorianus
ttttctttttatcttttcgctggag

SEQ ID NO: 187310 - DNA, 25 bp, Saccharomyces pastorianus
gaacaacggaccttttctgggatca

SEQ ID NO: 187311 - DNA, 25 bp, Saccharomyces pastorianus
ttcgctggagaatatctgccgtatg

SEQ ID NO: 187312 - DNA, 25 bp, Saccharomyces pastorianus
ccaacctccgtttgagtcatttcaa

SEQ ID NO: 187313 - DNA, 25 bp, Saccharomyces pastorianus
tctgggatcactacgatagctccat

SEQ ID NO: 187314 - DNA, 25 bp, Saccharomyces pastorianus
tggtacactattttcgagcctcttg

SEQ ID NO: 187315 - DNA, 25 bp, Saccharomyces pastorianus
catgaagtttggtgggctgcctcca

SEQ ID NO: 187316 - DNA, 25 bp, Saccharomyces pastorianus
atgcgccagattgcaaacagctctt

SEQ ID NO: 187317 - DNA, 25 bp, Saccharomyces pastorianus
tgtctccaatacctcagtctgctta

SEQ ID NO: 187318 - DNA, 25 bp, Saccharomyces pastorianus
acaacaaatgctgtgccgagtttag

SEQ ID NO: 187319 - DNA, 25 bp, Saccharomyces pastorianus
aacacagcgttaaccacatccgata

SEQ ID NO: 187320 - DNA, 25 bp, Saccharomyces pastorianus
cggataatcacccttcgccgtttct

SEQ ID NO: 187321 - DNA, 25 bp, Saccharomyces pastorianus
gaaagcataacacaatcagcaccat

SEQ ID NO: 187322 - DNA, 25 bp, Saccharomyces pastorianus
tttcagcaatcagagcggtcgccgc

SEQ ID NO: 187323 - DNA, 25 bp, Saccharomyces pastorianus
gtcgccgccataatattaactgcat

SEQ ID NO: 187324 - DNA, 25 bp, Saccharomyces pastorianus
aatcagcaccatccaacacagcgtt

SEQ ID NO: 187325 - DNA, 25 bp, Saccharomyces pastorianus
ttaactgcattcaccggataatcac

SEQ ID NO: 187326 - DNA, 25 bp, Saccharomyces pastorianus
ttcgccgtttctccagaaagcataa

SEQ ID NO: 187327 - DNA, 25 bp, Saccharomyces pastorianus
gcgttaaccacatccgatacttcgg

SEQ ID NO: 187328 - DNA, 25 bp, Saccharomyces pastorianus
agcggtcgccgccataatattaact

SEQ ID NO: 187329 - DNA, 25 bp, Saccharomyces pastorianus
ggcgatagtactttcagcaatcaga

SEQ ID NO: 187330 - DNA, 25 bp, Saccharomyces pastorianus
aatacagtccatgctaaattctggg

SEQ ID NO: 187331 - DNA, 25 bp, Saccharomyces pastorianus
aagatcggcctccatcagcggcatt

SEQ ID NO: 187332 - DNA, 25 bp, Saccharomyces pastorianus
ctgccgatacggttcacaaagttgg

SEQ ID NO: 187333 - DNA, 25 bp, Saccharomyces pastorianus
atgagggctcaaacgcaaacagcga

SEQ ID NO: 187334 - DNA, 25 bp, Saccharomyces pastorianus
ggcatttcagaccaccaacaggaag

SEQ ID NO: 187335 - DNA, 25 bp, Saccharomyces pastorianus
tgcggcggttacgtcagagatgaat

SEQ ID NO: 187336 - DNA, 25 bp, Saccharomyces pastorianus
atttgaatgagatctccacccgttc

SEQ ID NO: 187337 - DNA, 25 bp, Saccharomyces pastorianus
gaaactaccacattcgttccattag

SEQ ID NO: 187338 - DNA, 25 bp, Saccharomyces pastorianus
agatgggtctaaccatatccgctgc

SEQ ID NO: 187339 - DNA, 25 bp, Saccharomyces pastorianus
aaacagcgactctctcaagatgggt

SEQ ID NO: 187340 - DNA, 25 bp, Saccharomyces pastorianus
taaaggttcttcaatgtcgccaaaa

SEQ ID NO: 187341 - DNA, 25 bp, Saccharomyces pastorianus
gaatcctaagggtactgacaaattt

SEQ ID NO: 187342 - DNA, 25 bp, Saccharomyces pastorianus
atttggaactatttccatcgggatt

SEQ ID NO: 187343 - DNA, 25 bp, Saccharomyces pastorianus
tgaatcctaagggtactgacaaatt

SEQ ID NO: 187344 - DNA, 25 bp, Saccharomyces pastorianus
gctatgtaatcatttcacactatta

SEQ ID NO: 187345 - DNA, 25 bp, Saccharomyces pastorianus
gaacacgctatgtaatcatttcaca

SEQ ID NO: 187346 - DNA, 25 bp, Saccharomyces pastorianus
atcatttcacactattaacatttgg

SEQ ID NO: 187347 - DNA, 25 bp, Saccharomyces pastorianus
tggaactatttccatcgggattata

SEQ ID NO: 187348 - DNA, 25 bp, Saccharomyces pastorianus
tcacactattaacatttggaactat

SEQ ID NO: 187349 - DNA, 25 bp, Saccharomyces pastorianus
cacgctatgtaatcatttcacacta

SEQ ID NO: 187350 - DNA, 25 bp, Saccharomyces pastorianus
aacatttggaactatttccatcggg

SEQ ID NO: 187351 - DNA, 25 bp, Saccharomyces pastorianus
taagggtactgacaaatttagcatc

SEQ ID NO: 187352 - DNA, 25 bp, Saccharomyces pastorianus
atctattacattatgggtggtatgt

SEQ ID NO: 187353 - DNA, 25 bp, Saccharomyces pastorianus
ctattacattatgggtggtatgttg

SEQ ID NO: 187354 - DNA, 25 bp, Saccharomyces pastorianus
cattatgggtggtatgttggaataa

SEQ ID NO: 187355 - DNA, 25 bp, Saccharomyces pastorianus
cattagatctattacattatgggtg

SEQ ID NO: 187356 - DNA, 25 bp, Saccharomyces pastorianus
tctattacattatgggtggtatgtt

SEQ ID NO: 187357 - DNA, 25 bp, Saccharomyces pastorianus
ttagatctattacattatgggtggt

SEQ ID NO: 187358 - DNA, 25 bp, Saccharomyces pastorianus
attatgggtggtatgttggaataaa

SEQ ID NO: 187359 - DNA, 25 bp, Saccharomyces pastorianus
tcattagatctattacattatgggt

SEQ ID NO: 187360 - DNA, 25 bp, Saccharomyces pastorianus
gatctattacattatgggtggtatg

SEQ ID NO: 187361 - DNA, 25 bp, Saccharomyces pastorianus
ttcattagatctattacattatggg

SEQ ID NO: 187362 - DNA, 25 bp, Saccharomyces pastorianus
attagatctattacattatgggtgg

SEQ ID NO: 187363 - DNA, 25 bp, Saccharomyces pastorianus
atgccttgctttttttaattgtatc

SEQ ID NO: 187364 - DNA, 25 bp, Saccharomyces pastorianus
tttactttcttccattatgccttgc

SEQ ID NO: 187365 - DNA, 25 bp, Saccharomyces pastorianus
gtggtaatctttctcttcatggtgt

SEQ ID NO: 187366 - DNA, 25 bp, Saccharomyces pastorianus
gtacggtggtaatctttctcttcat

SEQ ID NO: 187367 - DNA, 25 bp, Saccharomyces pastorianus
actttcttccattatgccttgcttt

SEQ ID NO: 187368 - DNA, 25 bp, Saccharomyces pastorianus
cactatttactttcttccattatgc

SEQ ID NO: 187369 - DNA, 25 bp, Saccharomyces pastorianus
tgatgaccttatatcagatttcttg

SEQ ID NO: 187370 - DNA, 25 bp, Saccharomyces pastorianus
aattgtatctacacgtcacgaaatg

SEQ ID NO: 187371 - DNA, 25 bp, Saccharomyces pastorianus
taatctttctcttcatggtgtggct

SEQ ID NO: 187372 - DNA, 25 bp, Saccharomyces pastorianus
atcagatttcttgtgtacggtggta

SEQ ID NO: 187373 - DNA, 25 bp, Saccharomyces pastorianus
acacgtcacgaaatgatgaccttat

SEQ ID NO: 187374 - DNA, 25 bp, Saccharomyces pastorianus
aatcgaacttggctatccctaccaa

SEQ ID NO: 187375 - DNA, 25 bp, Saccharomyces pastorianus
gaacagcgaaggatcgagcgtattt

SEQ ID NO: 187376 - DNA, 25 bp, Saccharomyces pastorianus
gaacttggctatccctaccaacttc

SEQ ID NO: 187377 - DNA, 25 bp, Saccharomyces pastorianus
tcaagtcgactctgcctccaaggaa

SEQ ID NO: 187378 - DNA, 25 bp, Saccharomyces pastorianus
tatccctaccaacttcaagtcgact

SEQ ID NO: 187379 - DNA, 25 bp, Saccharomyces pastorianus
ctaactagtaattcgcaatcgaact

SEQ ID NO: 187380 - DNA, 25 bp, Saccharomyces pastorianus
aacttcaagtcgactctgcctccaa

SEQ ID NO: 187381 - DNA, 25 bp, Saccharomyces pastorianus
gactgattttgaactaactagtaat

SEQ ID NO: 187382 - DNA, 25 bp, Saccharomyces pastorianus
ttggctatccctaccaacttcaagt

SEQ ID NO: 187383 - DNA, 25 bp, Saccharomyces pastorianus
agcgaaggatcgagcgtattttgag

SEQ ID NO: 187384 - DNA, 25 bp, Saccharomyces pastorianus
aactaactagtaattcgcaatcgaa

SEQ ID NO: 187385 - DNA, 25 bp, Saccharomyces pastorianus
ccaagaaaaaagccttgttggcgca

SEQ ID NO: 187386 - DNA, 25 bp, Saccharomyces pastorianus
agaaaaaagccttgttggcgcaatc

SEQ ID NO: 187387 - DNA, 25 bp, Saccharomyces pastorianus
aaaagccttgttggcgcaatcggta

SEQ ID NO: 187388 - DNA, 25 bp, Saccharomyces pastorianus
aagccttgttggcgcaatcggtagc

SEQ ID NO: 187389 - DNA, 25 bp, Saccharomyces pastorianus
gaaaaaagccttgttggcgcaatcg

SEQ ID NO: 187390 - DNA, 25 bp, Saccharomyces pastorianus
aaaaagccttgttggcgcaatcggt

SEQ ID NO: 187391 - DNA, 25 bp, Saccharomyces pastorianus
aagaaaaaagccttgttggcgcaat

SEQ ID NO: 187392 - DNA, 25 bp, Saccharomyces pastorianus
aaaaaagccttgttggcgcaatcgg

SEQ ID NO: 187393 - DNA, 25 bp, Saccharomyces pastorianus
tcccaagaaaaaagccttgttggcg

SEQ ID NO: 187394 - DNA, 25 bp, Saccharomyces pastorianus
caagaaaaaagccttgttggcgcaa

SEQ ID NO: 187395 - DNA, 25 bp, Saccharomyces pastorianus
aaagccttgttggcgcaatcggtag

SEQ ID NO: 187396 - DNA, 25 bp, Saccharomyces pastorianus
taagtttgatgaccgtttctcaatc

SEQ ID NO: 187397 - DNA, 25 bp, Saccharomyces pastorianus
tatcttacttcatcatcaatcctcg

SEQ ID NO: 187398 - DNA, 25 bp, Saccharomyces pastorianus
atcctcgtgtctctgcttatattaa

SEQ ID NO: 187399 - DNA, 25 bp, Saccharomyces pastorianus
ttcatcatcaatcctcgtgtctctg

SEQ ID NO: 187400 - DNA, 25 bp, Saccharomyces pastorianus
gtcgtacattatcttacttcatcat

SEQ ID NO: 187401 - DNA, 25 bp, Saccharomyces pastorianus
cctcgtgtctctgcttatattaagt

SEQ ID NO: 187402 - DNA, 25 bp, Saccharomyces pastorianus
tattttttcttccttgtcgtacatt

SEQ ID NO: 187403 - DNA, 25 bp, Saccharomyces pastorianus
gtgtctctgcttatattaagtttga

SEQ ID NO: 187404 - DNA, 25 bp, Saccharomyces pastorianus
ttacttcatcatcaatcctcgtgtc

SEQ ID NO: 187405 - DNA, 25 bp, Saccharomyces pastorianus
atcaatcctcgtgtctctgcttata

SEQ ID NO: 187406 - DNA, 25 bp, Saccharomyces pastorianus
tcttccttgtcgtacattatcttac

SEQ ID NO: 187407 - DNA, 25 bp, Saccharomyces pastorianus
tatataaccgcaatgactacagtca

SEQ ID NO: 187408 - DNA, 25 bp, Saccharomyces pastorianus
agtcatgagcggagcatcctatgca

SEQ ID NO: 187409 - DNA, 25 bp, Saccharomyces pastorianus
actacagtcatgagcggagcatcct

SEQ ID NO: 187410 - DNA, 25 bp, Saccharomyces pastorianus
gaagagaactttttcagaatgtttt

SEQ ID NO: 187411 - DNA, 25 bp, Saccharomyces pastorianus
atctaggatatataaccgcaatgac

SEQ ID NO: 187412 - DNA, 25 bp, Saccharomyces pastorianus
gaaacggatgagacttttgagaaga

SEQ ID NO: 187413 - DNA, 25 bp, Saccharomyces pastorianus
agcgacgaggaaacggatgagactt

SEQ ID NO: 187414 - DNA, 25 bp, Saccharomyces pastorianus
tatgaaaagcaagcaagcgacgagg

SEQ ID NO: 187415 - DNA, 25 bp, Saccharomyces pastorianus
atgatatatcttggaactggtgtat

SEQ ID NO: 187416 - DNA, 25 bp, Saccharomyces pastorianus
ggaactggtgtattgttacttctat

SEQ ID NO: 187417 - DNA, 25 bp, Saccharomyces pastorianus
gaatgtttttacttatctaggatat

SEQ ID NO: 187418 - DNA, 25 bp, Saccharomyces pastorianus
agatcacttgactaatcagccagta

SEQ ID NO: 187419 - DNA, 25 bp, Saccharomyces pastorianus
actcaggaaccaaacagctcttata

SEQ ID NO: 187420 - DNA, 25 bp, Saccharomyces pastorianus
aagccatggtcattgtggtcccaaa

SEQ ID NO: 187421 - DNA, 25 bp, Saccharomyces pastorianus
gaacgaacccactacgaatcaagag

SEQ ID NO: 187422 - DNA, 25 bp, Saccharomyces pastorianus
agcctgttcctaactcggatcatag

SEQ ID NO: 187423 - DNA, 25 bp, Saccharomyces pastorianus
gactcctgaaacgataaccccagtg

SEQ ID NO: 187424 - DNA, 25 bp, Saccharomyces pastorianus
tggacaaccagaacgccgagcctgt

SEQ ID NO: 187425 - DNA, 25 bp, Saccharomyces pastorianus
gattccgataaaactgagactcctg

SEQ ID NO: 187426 - DNA, 25 bp, Saccharomyces pastorianus
tcctaaccctgtcccattggatttt

SEQ ID NO: 187427 - DNA, 25 bp, Saccharomyces pastorianus
atagcagttcaaaccgcgaccaaga

SEQ ID NO: 187428 - DNA, 25 bp, Saccharomyces pastorianus
gaagaaagccacctcgatgatataa

SEQ ID NO: 187429 - DNA, 25 bp, Saccharomyces pastorianus
agctcagggatgacatcgcatcttt

SEQ ID NO: 187430 - DNA, 25 bp, Saccharomyces pastorianus
tcaatttggcagaaagctacctctg

SEQ ID NO: 187431 - DNA, 25 bp, Saccharomyces pastorianus
gattgcttgatcgacacgttcaatt

SEQ ID NO: 187432 - DNA, 25 bp, Saccharomyces pastorianus
gttcaatttggcagaaagctacctc

SEQ ID NO: 187433 - DNA, 25 bp, Saccharomyces pastorianus
atgacatcgcatctttgcaaggatt

SEQ ID NO: 187434 - DNA, 25 bp, Saccharomyces pastorianus
aaggattgcttgatcgacacgttca

SEQ ID NO: 187435 - DNA, 25 bp, Saccharomyces pastorianus
gacacgttcaatttggcagaaagct

SEQ ID NO: 187436 - DNA, 25 bp, Saccharomyces pastorianus
gatcgacacgttcaatttggcagaa

SEQ ID NO: 187437 - DNA, 25 bp, Saccharomyces pastorianus
gggagctcagggatgacatcgcatc

SEQ ID NO: 187438 - DNA, 25 bp, Saccharomyces pastorianus
cagggatgacatcgcatctttgcaa

SEQ ID NO: 187439 - DNA, 25 bp, Saccharomyces pastorianus
catcgcatctttgcaaggattgctt

SEQ ID NO: 187440 - DNA, 25 bp, Saccharomyces pastorianus
acttgtagcaccttctatagaggaa

SEQ ID NO: 187441 - DNA, 25 bp, Saccharomyces pastorianus
aaatacggcaccatttgtcgtcgat

SEQ ID NO: 187442 - DNA, 25 bp, Saccharomyces pastorianus
gacggatgatcattattctcgacat

SEQ ID NO: 187443 - DNA, 25 bp, Saccharomyces pastorianus
atcccaacgaattaagagctcttag

SEQ ID NO: 187444 - DNA, 25 bp, Saccharomyces pastorianus
gacattgtccgaaggctatccagtg

SEQ ID NO: 187445 - DNA, 25 bp, Saccharomyces pastorianus
gaggtgggtcattacaggtcacaat

SEQ ID NO: 187446 - DNA, 25 bp, Saccharomyces pastorianus
aggattgtccccatataatatgttc

SEQ ID NO: 187447 - DNA, 25 bp, Saccharomyces pastorianus
gcagggtagatattttggcgtaagc

SEQ ID NO: 187448 - DNA, 25 bp, Saccharomyces pastorianus
aactcctccagataaacttgtagca

SEQ ID NO: 187449 - DNA, 25 bp, Saccharomyces pastorianus
aagttcagtgcgctctttgtaagag

SEQ ID NO: 187450 - DNA, 25 bp, Saccharomyces pastorianus
tttgtcgtcgatacggcacccacaa

SEQ ID NO: 187451 - DNA, 25 bp, Saccharomyces pastorianus
tataccaggaagtcaactcccagac

SEQ ID NO: 187452 - DNA, 25 bp, Saccharomyces pastorianus
atcctcaaaatgaagacgatagttt

SEQ ID NO: 187453 - DNA, 25 bp, Saccharomyces pastorianus
gaatataccaggaagtcaactccca

SEQ ID NO: 187454 - DNA, 25 bp, Saccharomyces pastorianus
gaagtcaactcccagaccttgaaat

SEQ ID NO: 187455 - DNA, 25 bp, Saccharomyces pastorianus
gaagacgatagttttacataataat

SEQ ID NO: 187456 - DNA, 25 bp, Saccharomyces pastorianus
tcccagaccttgaaatcctcaaaat

SEQ ID NO: 187457 - DNA, 25 bp, Saccharomyces pastorianus
atttgcgcatatataacagagatag

SEQ ID NO: 187458 - DNA, 25 bp, Saccharomyces pastorianus
aggaagtcaactcccagaccttgaa

SEQ ID NO: 187459 - DNA, 25 bp, Saccharomyces pastorianus
aattgttgggatttcacaactattg

SEQ ID NO: 187460 - DNA, 25 bp, Saccharomyces pastorianus
gggatttcacaactattgaaggcta

SEQ ID NO: 187461 - DNA, 25 bp, Saccharomyces pastorianus
aactcccagaccttgaaatcctcaa

SEQ ID NO: 187462 - DNA, 25 bp, Saccharomyces pastorianus
gttcctagagaacatatttgacccg

SEQ ID NO: 187463 - DNA, 25 bp, Saccharomyces pastorianus
atcaggctacggaactcggagagca

SEQ ID NO: 187464 - DNA, 25 bp, Saccharomyces pastorianus
aagatattttcatcgtctgagagac

SEQ ID NO: 187465 - DNA, 25 bp, Saccharomyces pastorianus
aaggatgtcaactcgatgcaaacaa

SEQ ID NO: 187466 - DNA, 25 bp, Saccharomyces pastorianus
tttgcctggccttcaaagatgccgg

SEQ ID NO: 187467 - DNA, 25 bp, Saccharomyces pastorianus
gtatgatgctcttcacaacaggcag

SEQ ID NO: 187468 - DNA, 25 bp, Saccharomyces pastorianus
agatgccggagccatatttagtcat

SEQ ID NO: 187469 - DNA, 25 bp, Saccharomyces pastorianus
aatgctgaaaaagtcgatccttcta

SEQ ID NO: 187470 - DNA, 25 bp, Saccharomyces pastorianus
gcaggtcctgccaaatatcaggcta

SEQ ID NO: 187471 - DNA, 25 bp, Saccharomyces pastorianus
gatgacagtaatgccgccaaagatt

SEQ ID NO: 187472 - DNA, 25 bp, Saccharomyces pastorianus
gtacttctgaagatcctagtttgtt

SEQ ID NO: 187473 - DNA, 25 bp, Saccharomyces pastorianus
gaacctagcagcgaatctgtcaaga

SEQ ID NO: 187474 - DNA, 25 bp, Saccharomyces pastorianus
tagttaagcgttgtacctccggaag

SEQ ID NO: 187475 - DNA, 25 bp, Saccharomyces pastorianus
gtacctccggaagaccagaagatct

SEQ ID NO: 187476 - DNA, 25 bp, Saccharomyces pastorianus
gaagatgttagagttcccgatgaag

SEQ ID NO: 187477 - DNA, 25 bp, Saccharomyces pastorianus
gagcttggaaatcttgacgctccaa

SEQ ID NO: 187478 - DNA, 25 bp, Saccharomyces pastorianus
gaaggcgataaaatcaccggcaaag

SEQ ID NO: 187479 - DNA, 25 bp, Saccharomyces pastorianus
gactcctgagtctccaaaagtagtt

SEQ ID NO: 187480 - DNA, 25 bp, Saccharomyces pastorianus
agaagaagatcccaaatcccagcgc

SEQ ID NO: 187481 - DNA, 25 bp, Saccharomyces pastorianus
agcaagtgatgttggaactgccgaa

SEQ ID NO: 187482 - DNA, 25 bp, Saccharomyces pastorianus
tgaagctactgaggctgcgagcgaa

SEQ ID NO: 187483 - DNA, 25 bp, Saccharomyces pastorianus
atcccagcgcgttcaaatttcaaca

SEQ ID NO: 187484 - DNA, 25 bp, Saccharomyces pastorianus
tgtggttaagtttgttttctccctg

SEQ ID NO: 187485 - DNA, 25 bp, Saccharomyces pastorianus
cacgactaaatgtcaaagtgctcta

SEQ ID NO: 187486 - DNA, 25 bp, Saccharomyces pastorianus
aagtgctctaattactctgcctatc

SEQ ID NO: 187487 - DNA, 25 bp, Saccharomyces pastorianus
ggatgttgtaaaccactatgaccaa

SEQ ID NO: 187488 - DNA, 25 bp, Saccharomyces pastorianus
gtcgaaattgccagggatatgctag

SEQ ID NO: 187489 - DNA, 25 bp, Saccharomyces pastorianus
tactctgcctatcacgagacttttg

SEQ ID NO: 187490 - DNA, 25 bp, Saccharomyces pastorianus
caatgcccacataccagtcgaaatt

SEQ ID NO: 187491 - DNA, 25 bp, Saccharomyces pastorianus
tttctccctgaaatactgtgatcct

SEQ ID NO: 187492 - DNA, 25 bp, Saccharomyces pastorianus
cttggaatgttttgcgcgatgtggt

SEQ ID NO: 187493 - DNA, 25 bp, Saccharomyces pastorianus
cacgagacttttgcaatcaagcgtt

SEQ ID NO: 187494 - DNA, 25 bp, Saccharomyces pastorianus
gttcacggtcctgggatatcagcaa

SEQ ID NO: 187495 - DNA, 25 bp, Saccharomyces pastorianus
cagatccgaatatgcgcgcttgtat

SEQ ID NO: 187496 - DNA, 25 bp, Saccharomyces pastorianus
gaagcgcaaagtaagatctgttatt

SEQ ID NO: 187497 - DNA, 25 bp, Saccharomyces pastorianus
aggacaatctatggataactcaatt

SEQ ID NO: 187498 - DNA, 25 bp, Saccharomyces pastorianus
tgaaaccttggtcgagaagcgcaaa

SEQ ID NO: 187499 - DNA, 25 bp, Saccharomyces pastorianus
aattgaagacttagcggttatgtat

SEQ ID NO: 187500 - DNA, 25 bp, Saccharomyces pastorianus
gcgcgcttgtattataggacaatct

SEQ ID NO: 187501 - DNA, 25 bp, Saccharomyces pastorianus
agctaagcacttgtttttttatggt

SEQ ID NO: 187502 - DNA, 25 bp, Saccharomyces pastorianus
aactcaattgaagacttagcggtta

SEQ ID NO: 187503 - DNA, 25 bp, Saccharomyces pastorianus
caaaatacttgaaaccttggtcgag

SEQ ID NO: 187504 - DNA, 25 bp, Saccharomyces pastorianus
aatatgcgcgcttgtattataggac

SEQ ID NO: 187505 - DNA, 25 bp, Saccharomyces pastorianus
tcaccgatagcagatccgaatatgc

SEQ ID NO: 187506 - DNA, 25 bp, Saccharomyces pastorianus
ttttagttccagatcgttcaccgag

SEQ ID NO: 187507 - DNA, 25 bp, Saccharomyces pastorianus
atggcgcagcttgccgatctgtaaa

SEQ ID NO: 187508 - DNA, 25 bp, Saccharomyces pastorianus
atcatctttttcgtttctcaggtca

SEQ ID NO: 187509 - DNA, 25 bp, Saccharomyces pastorianus
ttacttccagatccttttctcttaa

SEQ ID NO: 187510 - DNA, 25 bp, Saccharomyces pastorianus
aacatgctgttttgattcttcctcg

SEQ ID NO: 187511 - DNA, 25 bp, Saccharomyces pastorianus
gttcaccgagttttgcaatgctgtt

SEQ ID NO: 187512 - DNA, 25 bp, Saccharomyces pastorianus
ttcctcgtatttttccttcatagac

SEQ ID NO: 187513 - DNA, 25 bp, Saccharomyces pastorianus
aattcctcttcctttttgctgacaa

SEQ ID NO: 187514 - DNA, 25 bp, Saccharomyces pastorianus
atccacggattctgagtcgcttgac

SEQ ID NO: 187515 - DNA, 25 bp, Saccharomyces pastorianus
atatcattgttgtgtgcttccagct

SEQ ID NO: 187516 - DNA, 25 bp, Saccharomyces pastorianus
aatgctgttttctcactttcgtgta

SEQ ID NO: 187517 - DNA, 25 bp, Saccharomyces pastorianus
atagcgcccctaccaatgaagatat

SEQ ID NO: 187518 - DNA, 25 bp, Saccharomyces pastorianus
aaggaggttctacaaaattcacaat

SEQ ID NO: 187519 - DNA, 25 bp, Saccharomyces pastorianus
gggtctcagctagaacaaagcattg

SEQ ID NO: 187520 - DNA, 25 bp, Saccharomyces pastorianus
gccatgtccgtagctagctatttga

SEQ ID NO: 187521 - DNA, 25 bp, Saccharomyces pastorianus
aacccgttcgcggtgagagatcctc

SEQ ID NO: 187522 - DNA, 25 bp, Saccharomyces pastorianus
aattcacaatgcctgcgtgcaatta

SEQ ID NO: 187523 - DNA, 25 bp, Saccharomyces pastorianus
gggaggcaataaaagtcatctacga

SEQ ID NO: 187524 - DNA, 25 bp, Saccharomyces pastorianus
gagatcctctccagctaaggaggtt

SEQ ID NO: 187525 - DNA, 25 bp, Saccharomyces pastorianus
aaaagtcatctacgatagcgcccct

SEQ ID NO: 187526 - DNA, 25 bp, Saccharomyces pastorianus
tatggtcaagaatgggtctcagcta

SEQ ID NO: 187527 - DNA, 25 bp, Saccharomyces pastorianus
cctgcgtgcaattaagggaggcaat

SEQ ID NO: 187528 - DNA, 25 bp, Saccharomyces pastorianus
gtcccgaacagttgaagagccctga

SEQ ID NO: 187529 - DNA, 25 bp, Saccharomyces pastorianus
atgggctcattccagctcaatacat

SEQ ID NO: 187530 - DNA, 25 bp, Saccharomyces pastorianus
aagtgctcgctcgtgatatcacatc

SEQ ID NO: 187531 - DNA, 25 bp, Saccharomyces pastorianus
gggacgttaatgattctccaattat

SEQ ID NO: 187532 - DNA, 25 bp, Saccharomyces pastorianus
acttgatcatccacttactactacg

SEQ ID NO: 187533 - DNA, 25 bp, Saccharomyces pastorianus
agcaagtactcttctgccgatgggc

SEQ ID NO: 187534 - DNA, 25 bp, Saccharomyces pastorianus
atacatcttaaacgctacacacttg

SEQ ID NO: 187535 - DNA, 25 bp, Saccharomyces pastorianus
gctgtcattaagctctcaaatcggt

SEQ ID NO: 187536 - DNA, 25 bp, Saccharomyces pastorianus
aaacagcgacttacatttgcaaatt

SEQ ID NO: 187537 - DNA, 25 bp, Saccharomyces pastorianus
aagttagcatctttaaccagcgaga

SEQ ID NO: 187538 - DNA, 25 bp, Saccharomyces pastorianus
aatcactgacggttttattagcaag

SEQ ID NO: 187539 - DNA, 25 bp, Saccharomyces pastorianus
gtacatttatcgtcggtgatgtgtt

SEQ ID NO: 187540 - DNA, 25 bp, Saccharomyces pastorianus
acagggcatctgtgagtttcttgaa

SEQ ID NO: 187541 - DNA, 25 bp, Saccharomyces pastorianus
gttacccagaaaccattggtacatt

SEQ ID NO: 187542 - DNA, 25 bp, Saccharomyces pastorianus
cccggatttgcaacctattaagtcg

SEQ ID NO: 187543 - DNA, 25 bp, Saccharomyces pastorianus
gcatctgtgagtttcttgaagaacc

SEQ ID NO: 187544 - DNA, 25 bp, Saccharomyces pastorianus
taggtgttggattaagttacccaga

SEQ ID NO: 187545 - DNA, 25 bp, Saccharomyces pastorianus
ccattggtacatttatcgtcggtga

SEQ ID NO: 187546 - DNA, 25 bp, Saccharomyces pastorianus
agtctccagggctttgagatttttg

SEQ ID NO: 187547 - DNA, 25 bp, Saccharomyces pastorianus
attggcaaactcgtgtcctggttac

SEQ ID NO: 187548 - DNA, 25 bp, Saccharomyces pastorianus
tttcggtagtaaagtctccagggct

SEQ ID NO: 187549 - DNA, 25 bp, Saccharomyces pastorianus
gaccattattttcacattggcaaac

SEQ ID NO: 187550 - DNA, 25 bp, Saccharomyces pastorianus
atatgtggttgtccaagcaagagtg

SEQ ID NO: 187551 - DNA, 25 bp, Saccharomyces pastorianus
gataaggatcatatgtggttgtcca

SEQ ID NO: 187552 - DNA, 25 bp, Saccharomyces pastorianus
ataaggatcatatgtggttgtccaa

SEQ ID NO: 187553 - DNA, 25 bp, Saccharomyces pastorianus
tcatatgtggttgtccaagcaagag

SEQ ID NO: 187554 - DNA, 25 bp, Saccharomyces pastorianus
ctgataaggatcatatgtggttgtc

SEQ ID NO: 187555 - DNA, 25 bp, Saccharomyces pastorianus
taaggatcatatgtggttgtccaag

SEQ ID NO: 187556 - DNA, 25 bp, Saccharomyces pastorianus
gatcatatgtggttgtccaagcaag

SEQ ID NO: 187557 - DNA, 25 bp, Saccharomyces pastorianus
tgataaggatcatatgtggttgtcc

SEQ ID NO: 187558 - DNA, 25 bp, Saccharomyces pastorianus
ggatcatatgtggttgtccaagcaa

SEQ ID NO: 187559 - DNA, 25 bp, Saccharomyces pastorianus
gtccaagcaagagtggcaagaaagt

SEQ ID NO: 187560 - DNA, 25 bp, Saccharomyces pastorianus
aaggatcatatgtggttgtccaagc

SEQ ID NO: 187561 - DNA, 25 bp, Saccharomyces pastorianus
gagatttggttcctccaattgggct

SEQ ID NO: 187562 - DNA, 25 bp, Saccharomyces pastorianus
gatgcctatggatatcttcaaccat

SEQ ID NO: 187563 - DNA, 25 bp, Saccharomyces pastorianus
tgccggtgcgttcttctgtggtctt

SEQ ID NO: 187564 - DNA, 25 bp, Saccharomyces pastorianus
ggtgcctccacctgtgacaaactat

SEQ ID NO: 187565 - DNA, 25 bp, Saccharomyces pastorianus
tatgatctcgtactggttcggttcc

SEQ ID NO: 187566 - DNA, 25 bp, Saccharomyces pastorianus
tttttggtgttattggtgcctccac

SEQ ID NO: 187567 - DNA, 25 bp, Saccharomyces pastorianus
gtggtctttcatttgtcctatctca

SEQ ID NO: 187568 - DNA, 25 bp, Saccharomyces pastorianus
accatctgtgcattgttaattccaa

SEQ ID NO: 187569 - DNA, 25 bp, Saccharomyces pastorianus
tcctatctcaaatgtcctacaccat

SEQ ID NO: 187570 - DNA, 25 bp, Saccharomyces pastorianus
tggctccaccaaagcttgggcttgg

SEQ ID NO: 187571 - DNA, 25 bp, Saccharomyces pastorianus
taattccaaccactttaatcccagt

SEQ ID NO: 187572 - DNA, 25 bp, Saccharomyces pastorianus
gtgcctgtgaagtttccgctttcgg

SEQ ID NO: 187573 - DNA, 25 bp, Saccharomyces pastorianus
tgtgaagtttccgctttcggtcaaa

SEQ ID NO: 187574 - DNA, 25 bp, Saccharomyces pastorianus
cctgtgaagtttccgctttcggtca

SEQ ID NO: 187575 - DNA, 25 bp, Saccharomyces pastorianus
catacatctttcataggtttcgtat

SEQ ID NO: 187576 - DNA, 25 bp, Saccharomyces pastorianus
cgtgcctgtgaagtttccgctttcg

SEQ ID NO: 187577 - DNA, 25 bp, Saccharomyces pastorianus
catctttcataggtttcgtatgtgg

SEQ ID NO: 187578 - DNA, 25 bp, Saccharomyces pastorianus
atcatacatctttcataggtttcgt

SEQ ID NO: 187579 - DNA, 25 bp, Saccharomyces pastorianus
gaatcatacatctttcataggtttc

SEQ ID NO: 187580 - DNA, 25 bp, Saccharomyces pastorianus
ctgtgaagtttccgctttcggtcaa

SEQ ID NO: 187581 - DNA, 25 bp, Saccharomyces pastorianus
ccgtgcctgtgaagtttccgctttc

SEQ ID NO: 187582 - DNA, 25 bp, Saccharomyces pastorianus
gcctgtgaagtttccgctttcggtc

SEQ ID NO: 187583 - DNA, 25 bp, Saccharomyces pastorianus
gcctgtgatacttccttttttggta

SEQ ID NO: 187584 - DNA, 25 bp, Saccharomyces pastorianus
tacttccttttttggtatagcagaa

SEQ ID NO: 187585 - DNA, 25 bp, Saccharomyces pastorianus
gtgatacttccttttttggtatagc

SEQ ID NO: 187586 - DNA, 25 bp, Saccharomyces pastorianus
ttccgtgcctgtgatacttcctttt

SEQ ID NO: 187587 - DNA, 25 bp, Saccharomyces pastorianus
aaacgaggcatgtatctttatagat

SEQ ID NO: 187588 - DNA, 25 bp, Saccharomyces pastorianus
ccttttttggtatagcagaatgtct

SEQ ID NO: 187589 - DNA, 25 bp, Saccharomyces pastorianus
cactatgaagatgtttttgttttta

SEQ ID NO: 187590 - DNA, 25 bp, Saccharomyces pastorianus
cgtgcctgtgatacttccttttttg

SEQ ID NO: 187591 - DNA, 25 bp, Saccharomyces pastorianus
gtttttaaacgaggcatgtatcttt

SEQ ID NO: 187592 - DNA, 25 bp, Saccharomyces pastorianus
atagattctgtatgcgaaggtattg

SEQ ID NO: 187593 - DNA, 25 bp, Saccharomyces pastorianus
gtatctttatagattctgtatgcga

SEQ ID NO: 187594 - DNA, 25 bp, Saccharomyces pastorianus
actttgttccggtcatggatgccaa

SEQ ID NO: 187595 - DNA, 25 bp, Saccharomyces pastorianus
accgcatgtggctaagtactcagaa

SEQ ID NO: 187596 - DNA, 25 bp, Saccharomyces pastorianus
gatcgactcgaatttcagtttttgc

SEQ ID NO: 187597 - DNA, 25 bp, Saccharomyces pastorianus
gaagctgcccgattctagtgatgaa

SEQ ID NO: 187598 - DNA, 25 bp, Saccharomyces pastorianus
atgatgctagcatgtttcccacatc

SEQ ID NO: 187599 - DNA, 25 bp, Saccharomyces pastorianus
atgccaaccggaacactcattcaat

SEQ ID NO: 187600 - DNA, 25 bp, Saccharomyces pastorianus
aatggctgggtaccatgttccagga

SEQ ID NO: 187601 - DNA, 25 bp, Saccharomyces pastorianus
gacgacacagacgatttccacacag

SEQ ID NO: 187602 - DNA, 25 bp, Saccharomyces pastorianus
gggcttgtgaacttgcaggccaacg

SEQ ID NO: 187603 - DNA, 25 bp, Saccharomyces pastorianus
gcgccatcttcaaggagccaacgag

SEQ ID NO: 187604 - DNA, 25 bp, Saccharomyces pastorianus
ttcaagcccatggtgatggcgactt

SEQ ID NO: 187605 - DNA, 25 bp, Saccharomyces pastorianus
aagatattagttcttgccctcgaag

SEQ ID NO: 187606 - DNA, 25 bp, Saccharomyces pastorianus
tcaaggagcttttcaccaataccat

SEQ ID NO: 187607 - DNA, 25 bp, Saccharomyces pastorianus
gtggagctcacgtcgaaaagactat

SEQ ID NO: 187608 - DNA, 25 bp, Saccharomyces pastorianus
tccatgggatgttcctggtatgcca

SEQ ID NO: 187609 - DNA, 25 bp, Saccharomyces pastorianus
gacgcctactacgatcttgagttac

SEQ ID NO: 187610 - DNA, 25 bp, Saccharomyces pastorianus
atccaaagctgatgcctgggtatct

SEQ ID NO: 187611 - DNA, 25 bp, Saccharomyces pastorianus
ttgccctcgaagacctaaaagatgt

SEQ ID NO: 187612 - DNA, 25 bp, Saccharomyces pastorianus
gaaattactcccgaagaggctacga

SEQ ID NO: 187613 - DNA, 25 bp, Saccharomyces pastorianus
ggaaaccttatcacacgtcaatttg

SEQ ID NO: 187614 - DNA, 25 bp, Saccharomyces pastorianus
gaggctacgaccatattttctgtta

SEQ ID NO: 187615 - DNA, 25 bp, Saccharomyces pastorianus
acgtcaatttgaaggccgttctaat

SEQ ID NO: 187616 - DNA, 25 bp, Saccharomyces pastorianus
tttccatttggtcttttcactacag

SEQ ID NO: 187617 - DNA, 25 bp, Saccharomyces pastorianus
ttcgaatgtcgatttgagctccaaa

SEQ ID NO: 187618 - DNA, 25 bp, Saccharomyces pastorianus
tcgtgccatttacagacagacccta

SEQ ID NO: 187619 - DNA, 25 bp, Saccharomyces pastorianus
gtagaataccacctagtacaggcca

SEQ ID NO: 187620 - DNA, 25 bp, Saccharomyces pastorianus
gtgccttattcgtgatatgcctaga

SEQ ID NO: 187621 - DNA, 25 bp, Saccharomyces pastorianus
agaagcctacaagcatcatcgtcgc

SEQ ID NO: 187622 - DNA, 25 bp, Saccharomyces pastorianus
atggcacttgcttaaatcgttggta

SEQ ID NO: 187623 - DNA, 25 bp, Saccharomyces pastorianus
aagtctatgctatgcggcacttcga

SEQ ID NO: 187624 - DNA, 25 bp, Saccharomyces pastorianus
gtacaggccaagagtcgtgccattt

SEQ ID NO: 187625 - DNA, 25 bp, Saccharomyces pastorianus
gccgattacgttaagtttgcagcat

SEQ ID NO: 187626 - DNA, 25 bp, Saccharomyces pastorianus
aattcgcctattttttcaacatctg

SEQ ID NO: 187627 - DNA, 25 bp, Saccharomyces pastorianus
tctcactttccactccatcacccat

SEQ ID NO: 187628 - DNA, 25 bp, Saccharomyces pastorianus
cactttccactccatcacccatctc

SEQ ID NO: 187629 - DNA, 25 bp, Saccharomyces pastorianus
aatctcactttccactccatcaccc

SEQ ID NO: 187630 - DNA, 25 bp, Saccharomyces pastorianus
actttccactccatcacccatctct

SEQ ID NO: 187631 - DNA, 25 bp, Saccharomyces pastorianus
tcactttccactccatcacccatct

SEQ ID NO: 187632 - DNA, 25 bp, Saccharomyces pastorianus
ctaatctcactttccactccatcac

SEQ ID NO: 187633 - DNA, 25 bp, Saccharomyces pastorianus
taatctcactttccactccatcacc

SEQ ID NO: 187634 - DNA, 25 bp, Saccharomyces pastorianus
atctcactttccactccatcaccca

SEQ ID NO: 187635 - DNA, 25 bp, Saccharomyces pastorianus
ccatcacccatctctcaccatcagt

SEQ ID NO: 187636 - DNA, 25 bp, Saccharomyces pastorianus
cctaatctcactttccactccatca

SEQ ID NO: 187637 - DNA, 25 bp, Saccharomyces pastorianus
tttccactccatcacccatctctca

SEQ ID NO: 187638 - DNA, 25 bp, Saccharomyces pastorianus
aagccgcattgtacaggttatctgg

SEQ ID NO: 187639 - DNA, 25 bp, Saccharomyces pastorianus
tttcccaggtgatactctaaaggtt

SEQ ID NO: 187640 - DNA, 25 bp, Saccharomyces pastorianus
aatattttaagctctgcacgccgac

SEQ ID NO: 187641 - DNA, 25 bp, Saccharomyces pastorianus
gggcgcacatgtacctccagaaaag

SEQ ID NO: 187642 - DNA, 25 bp, Saccharomyces pastorianus
ggttatctggcgatttcaatccttt

SEQ ID NO: 187643 - DNA, 25 bp, Saccharomyces pastorianus
gctcggttgtcgtttttcaaacaat

SEQ ID NO: 187644 - DNA, 25 bp, Saccharomyces pastorianus
tcaatcctttacatatcgatcccac

SEQ ID NO: 187645 - DNA, 25 bp, Saccharomyces pastorianus
gttaaatttcctacgccaattctgc

SEQ ID NO: 187646 - DNA, 25 bp, Saccharomyces pastorianus
gccaattctgcatgggctttgtaca

SEQ ID NO: 187647 - DNA, 25 bp, Saccharomyces pastorianus
cgctttagttgttggtggcttcgaa

SEQ ID NO: 187648 - DNA, 25 bp, Saccharomyces pastorianus
gatcccacgctagccaaagcagtta

SEQ ID NO: 187649 - DNA, 25 bp, Saccharomyces pastorianus
gagaattacaggtatacggtctgct

SEQ ID NO: 187650 - DNA, 25 bp, Saccharomyces pastorianus
ggtatacggtctgctttacaacgta

SEQ ID NO: 187651 - DNA, 25 bp, Saccharomyces pastorianus
caggtatacggtctgctttacaacg

SEQ ID NO: 187652 - DNA, 25 bp, Saccharomyces pastorianus
gaattacaggtatacggtctgcttt

SEQ ID NO: 187653 - DNA, 25 bp, Saccharomyces pastorianus
actgctgtacaaaatggagaattac

SEQ ID NO: 187654 - DNA, 25 bp, Saccharomyces pastorianus
tacaggtatacggtctgctttacaa

SEQ ID NO: 187655 - DNA, 25 bp, Saccharomyces pastorianus
cctactgtgcaaactgctgtacaaa

SEQ ID NO: 187656 - DNA, 25 bp, Saccharomyces pastorianus
gtgcaaactgctgtacaaaatggag

SEQ ID NO: 187657 - DNA, 25 bp, Saccharomyces pastorianus
gcaaactgctgtacaaaatggagaa

SEQ ID NO: 187658 - DNA, 25 bp, Saccharomyces pastorianus
attacaggtatacggtctgctttac

SEQ ID NO: 187659 - DNA, 25 bp, Saccharomyces pastorianus
tactgtgcaaactgctgtacaaaat

SEQ ID NO: 187660 - DNA, 25 bp, Saccharomyces pastorianus
gggaccaggctatgacgtcgtcaga

SEQ ID NO: 187661 - DNA, 25 bp, Saccharomyces pastorianus
gtgacatctgtaacatcttcaccaa

SEQ ID NO: 187662 - DNA, 25 bp, Saccharomyces pastorianus
tgttccaatgacacctatgttagat

SEQ ID NO: 187663 - DNA, 25 bp, Saccharomyces pastorianus
aagttccagtgttccaatgacacct

SEQ ID NO: 187664 - DNA, 25 bp, Saccharomyces pastorianus
aacgctagaggttacagtgacatct

SEQ ID NO: 187665 - DNA, 25 bp, Saccharomyces pastorianus
ggtgtgcatatgaaataaacgctag

SEQ ID NO: 187666 - DNA, 25 bp, Saccharomyces pastorianus
acttattatcaaacgggaccaggct

SEQ ID NO: 187667 - DNA, 25 bp, Saccharomyces pastorianus
gaactatttgaccactatcggcata

SEQ ID NO: 187668 - DNA, 25 bp, Saccharomyces pastorianus
tatgacgtcgtcagatccgtcggtg

SEQ ID NO: 187669 - DNA, 25 bp, Saccharomyces pastorianus
aacttgaccgccgaacatgttccat

SEQ ID NO: 187670 - DNA, 25 bp, Saccharomyces pastorianus
gaccactatcggcataatcgatgac

SEQ ID NO: 187671 - DNA, 25 bp, Saccharomyces pastorianus
gatactgccagtgccactttgctgg

SEQ ID NO: 187672 - DNA, 25 bp, Saccharomyces pastorianus
ttggcttctttatcctatatggtga

SEQ ID NO: 187673 - DNA, 25 bp, Saccharomyces pastorianus
agtaccagtgatactgccagtgcca

SEQ ID NO: 187674 - DNA, 25 bp, Saccharomyces pastorianus
agaaaaccacatcttatcctgcgtc

SEQ ID NO: 187675 - DNA, 25 bp, Saccharomyces pastorianus
acgttctattgctggttgtgttcca

SEQ ID NO: 187676 - DNA, 25 bp, Saccharomyces pastorianus
ggttgtgttccaagaatttcagtaa

SEQ ID NO: 187677 - DNA, 25 bp, Saccharomyces pastorianus
attgatgaaagcactagaaaaccac

SEQ ID NO: 187678 - DNA, 25 bp, Saccharomyces pastorianus
atagttattcatttttctccattac

SEQ ID NO: 187679 - DNA, 25 bp, Saccharomyces pastorianus
atcctgcgtcgttaccggatttatt

SEQ ID NO: 187680 - DNA, 25 bp, Saccharomyces pastorianus
ttttctccattactaaaggctcttc

SEQ ID NO: 187681 - DNA, 25 bp, Saccharomyces pastorianus
aaaggctcttcatggcatttagatg

SEQ ID NO: 187682 - DNA, 25 bp, Saccharomyces pastorianus
aactggtcagcggtgaggctactcc

SEQ ID NO: 187683 - DNA, 25 bp, Saccharomyces pastorianus
aacgttgctgacatgaccttggact

SEQ ID NO: 187684 - DNA, 25 bp, Saccharomyces pastorianus
gaatttccgggagatctagctgtaa

SEQ ID NO: 187685 - DNA, 25 bp, Saccharomyces pastorianus
aatcctcttgatgacctttacattg

SEQ ID NO: 187686 - DNA, 25 bp, Saccharomyces pastorianus
cacactgcccaatgaatttccggga

SEQ ID NO: 187687 - DNA, 25 bp, Saccharomyces pastorianus
tcagctccttccatctcaagaagta

SEQ ID NO: 187688 - DNA, 25 bp, Saccharomyces pastorianus
gacgaatcacacgtacttcaattta

SEQ ID NO: 187689 - DNA, 25 bp, Saccharomyces pastorianus
ggacctcatcagttgacagtgaaca

SEQ ID NO: 187690 - DNA, 25 bp, Saccharomyces pastorianus
gaaacaccaaccacagtagcatcag

SEQ ID NO: 187691 - DNA, 25 bp, Saccharomyces pastorianus
ggctactcccatcaacatgacgaat

SEQ ID NO: 187692 - DNA, 25 bp, Saccharomyces pastorianus
ttcagtatggaagatggacctcatc

SEQ ID NO: 187693 - DNA, 25 bp, Saccharomyces pastorianus
gtcaggttcactggaagcattacag

SEQ ID NO: 187694 - DNA, 25 bp, Saccharomyces pastorianus
attccagccaagaagcgtattctga

SEQ ID NO: 187695 - DNA, 25 bp, Saccharomyces pastorianus
gcgtattctgatacaacatccacga

SEQ ID NO: 187696 - DNA, 25 bp, Saccharomyces pastorianus
gaatgcaaagatacatgttcccaaa

SEQ ID NO: 187697 - DNA, 25 bp, Saccharomyces pastorianus
cgaacacttctagaatcgcagatca

SEQ ID NO: 187698 - DNA, 25 bp, Saccharomyces pastorianus
caaacacagtgatggttcaccacta

SEQ ID NO: 187699 - DNA, 25 bp, Saccharomyces pastorianus
acatgttcccaaacacagtgatggt

SEQ ID NO: 187700 - DNA, 25 bp, Saccharomyces pastorianus
caaacagtaaggaagtcaggttcac

SEQ ID NO: 187701 - DNA, 25 bp, Saccharomyces pastorianus
gggattctaattccagccaagaagc

SEQ ID NO: 187702 - DNA, 25 bp, Saccharomyces pastorianus
atacaacatccacgaacacttctag

SEQ ID NO: 187703 - DNA, 25 bp, Saccharomyces pastorianus
gaatcgcagatcaaaatcaacttaa

SEQ ID NO: 187704 - DNA, 25 bp, Saccharomyces pastorianus
tatgaaacccttttccgtgcctgtt

SEQ ID NO: 187705 - DNA, 25 bp, Saccharomyces pastorianus
tgccttatgaaacccttttccgtgc

SEQ ID NO: 187706 - DNA, 25 bp, Saccharomyces pastorianus
ataggggtgccggggtgccttatga

SEQ ID NO: 187707 - DNA, 25 bp, Saccharomyces pastorianus
gtgccttatgaaacccttttccgtg

SEQ ID NO: 187708 - DNA, 25 bp, Saccharomyces pastorianus
tataggggtgccggggtgccttatg

SEQ ID NO: 187709 - DNA, 25 bp, Saccharomyces pastorianus
cttatgaaacccttttccgtgcctg

SEQ ID NO: 187710 - DNA, 25 bp, Saccharomyces pastorianus
gtgccggggtgccttatgaaaccct

SEQ ID NO: 187711 - DNA, 25 bp, Saccharomyces pastorianus
ttataggggtgccggggtgccttat

SEQ ID NO: 187712 - DNA, 25 bp, Saccharomyces pastorianus
tgccggggtgccttatgaaaccctt

SEQ ID NO: 187713 - DNA, 25 bp, Saccharomyces pastorianus
taggggtgccggggtgccttatgaa

SEQ ID NO: 187714 - DNA, 25 bp, Saccharomyces pastorianus
ttatgaaacccttttccgtgcctgt

SEQ ID NO: 187715 - DNA, 25 bp, Saccharomyces pastorianus
gatacagtggattcttcagtcgata

SEQ ID NO: 187716 - DNA, 25 bp, Saccharomyces pastorianus
aacttcaagctgtcaaccagtgctc

SEQ ID NO: 187717 - DNA, 25 bp, Saccharomyces pastorianus
ctagagagacattggccagcattga

SEQ ID NO: 187718 - DNA, 25 bp, Saccharomyces pastorianus
agcctactcggttaacgttgctagt

SEQ ID NO: 187719 - DNA, 25 bp, Saccharomyces pastorianus
gtgccagtctacacgcaacatcagt

SEQ ID NO: 187720 - DNA, 25 bp, Saccharomyces pastorianus
gagaacgttaattcacacactccta

SEQ ID NO: 187721 - DNA, 25 bp, Saccharomyces pastorianus
atagcatctggtttcaacttcaagc

SEQ ID NO: 187722 - DNA, 25 bp, Saccharomyces pastorianus
accagtgctccgagtgagaacgtta

SEQ ID NO: 187723 - DNA, 25 bp, Saccharomyces pastorianus
gtgaaaaccgtgtactggacgactt

SEQ ID NO: 187724 - DNA, 25 bp, Saccharomyces pastorianus
gcaagaaccatgttgacccagcagc

SEQ ID NO: 187725 - DNA, 25 bp, Saccharomyces pastorianus
gtagtgacgaagatgcctttcccaa

SEQ ID NO: 187726 - DNA, 25 bp, Saccharomyces pastorianus
cgctgctaacgttatgggtactcaa

SEQ ID NO: 187727 - DNA, 25 bp, Saccharomyces pastorianus
atcggtatgggtctttacgttgcat

SEQ ID NO: 187728 - DNA, 25 bp, Saccharomyces pastorianus
cactatgggtctctgtttctttgga

SEQ ID NO: 187729 - DNA, 25 bp, Saccharomyces pastorianus
aaatgggcggctatttctctctttt

SEQ ID NO: 187730 - DNA, 25 bp, Saccharomyces pastorianus
gatatggctgcaactatttccgttt

SEQ ID NO: 187731 - DNA, 25 bp, Saccharomyces pastorianus
gttctttacatcttacaccttcgtt

SEQ ID NO: 187732 - DNA, 25 bp, Saccharomyces pastorianus
tacagagactgggtctacctctcaa

SEQ ID NO: 187733 - DNA, 25 bp, Saccharomyces pastorianus
tattacttctgctgtttggaccaaa

SEQ ID NO: 187734 - DNA, 25 bp, Saccharomyces pastorianus
ggaccaaagaattgcctggcgcctt

SEQ ID NO: 187735 - DNA, 25 bp, Saccharomyces pastorianus
gttgctgctgcgttgattgttacta

SEQ ID NO: 187736 - DNA, 25 bp, Saccharomyces pastorianus
gagtctttaactcttatctggcaag

SEQ ID NO: 187737 - DNA, 25 bp, Saccharomyces pastorianus
attgccaacaccaagaccgggtcaa

SEQ ID NO: 187738 - DNA, 25 bp, Saccharomyces pastorianus
tctaccgccttgaaaatcttagccg

SEQ ID NO: 187739 - DNA, 25 bp, Saccharomyces pastorianus
tttagaagcccatgtaactcaccgt

SEQ ID NO: 187740 - DNA, 25 bp, Saccharomyces pastorianus
caccaagaccgggtcaagtccttgg

SEQ ID NO: 187741 - DNA, 25 bp, Saccharomyces pastorianus
gaaacgctacatcaaaattttacag

SEQ ID NO: 187742 - DNA, 25 bp, Saccharomyces pastorianus
ggtattggtaagtctaccgccttga

SEQ ID NO: 187743 - DNA, 25 bp, Saccharomyces pastorianus
gaaaagttatctggtggtgaactgc

SEQ ID NO: 187744 - DNA, 25 bp, Saccharomyces pastorianus
gtttcaaactgcacagattgccaac

SEQ ID NO: 187745 - DNA, 25 bp, Saccharomyces pastorianus
caaggctataatcaaacctcaatat

SEQ ID NO: 187746 - DNA, 25 bp, Saccharomyces pastorianus
aaattacttcaccaagatgctggaa

SEQ ID NO: 187747 - DNA, 25 bp, Saccharomyces pastorianus
aagtcctgaagatgtgaaacgctac

SEQ ID NO: 187748 - DNA, 25 bp, Saccharomyces pastorianus
ctacagaatgagcaacacagtgaac

SEQ ID NO: 187749 - DNA, 25 bp, Saccharomyces pastorianus
gcccaataggtataccgaggagttt

SEQ ID NO: 187750 - DNA, 25 bp, Saccharomyces pastorianus
tcggtcaagccactacaactcacaa

SEQ ID NO: 187751 - DNA, 25 bp, Saccharomyces pastorianus
ggagtttcggtcaagccactacaac

SEQ ID NO: 187752 - DNA, 25 bp, Saccharomyces pastorianus
gggccctttgcgaagagtacgcggt

SEQ ID NO: 187753 - DNA, 25 bp, Saccharomyces pastorianus
aacacagtgaacaccgagcccaata

SEQ ID NO: 187754 - DNA, 25 bp, Saccharomyces pastorianus
acaccgagcccaataggtataccga

SEQ ID NO: 187755 - DNA, 25 bp, Saccharomyces pastorianus
acctttcatgccctttgcatcatcg

SEQ ID NO: 187756 - DNA, 25 bp, Saccharomyces pastorianus
cgaggagtttcggtcaagccactac

SEQ ID NO: 187757 - DNA, 25 bp, Saccharomyces pastorianus
aactcacaacctttcatgccctttg

SEQ ID NO: 187758 - DNA, 25 bp, Saccharomyces pastorianus
tgcatcatcgcctccttgtaacggg

SEQ ID NO: 187759 - DNA, 25 bp, Saccharomyces pastorianus
gtttgtcgtacacacagaattaacc

SEQ ID NO: 187760 - DNA, 25 bp, Saccharomyces pastorianus
gaattaaccttgatattttgcatga

SEQ ID NO: 187761 - DNA, 25 bp, Saccharomyces pastorianus
agaggcgtttattgtttgtcgtaca

SEQ ID NO: 187762 - DNA, 25 bp, Saccharomyces pastorianus
ttgcatgactatgcgccagagttat

SEQ ID NO: 187763 - DNA, 25 bp, Saccharomyces pastorianus
atgcgccagagttatttattgaaaa

SEQ ID NO: 187764 - DNA, 25 bp, Saccharomyces pastorianus
gtttattgtttgtcgtacacacaga

SEQ ID NO: 187765 - DNA, 25 bp, Saccharomyces pastorianus
gatattttgcatgactatgcgccag

SEQ ID NO: 187766 - DNA, 25 bp, Saccharomyces pastorianus
gactatgcgccagagttatttattg

SEQ ID NO: 187767 - DNA, 25 bp, Saccharomyces pastorianus
atcggaagggttgattatctcaatt

SEQ ID NO: 187768 - DNA, 25 bp, Saccharomyces pastorianus
ggcgtttattgtttgtcgtacacac

SEQ ID NO: 187769 - DNA, 25 bp, Saccharomyces pastorianus
tatttatcaaccaaatcggaagggt

SEQ ID NO: 187770 - DNA, 25 bp, Saccharomyces pastorianus
agtgctgcagccgttgatctattca

SEQ ID NO: 187771 - DNA, 25 bp, Saccharomyces pastorianus
taaggaagctgttattggcccaata

SEQ ID NO: 187772 - DNA, 25 bp, Saccharomyces pastorianus
gacggatgactggtttcgttaacat

SEQ ID NO: 187773 - DNA, 25 bp, Saccharomyces pastorianus
ttattgggcacacaatccatctctg

SEQ ID NO: 187774 - DNA, 25 bp, Saccharomyces pastorianus
aatgcatttgattggtctacttcta

SEQ ID NO: 187775 - DNA, 25 bp, Saccharomyces pastorianus
gcaactgccactgcattgatggaca

SEQ ID NO: 187776 - DNA, 25 bp, Saccharomyces pastorianus
gaagcggcggactcaattattagaa

SEQ ID NO: 187777 - DNA, 25 bp, Saccharomyces pastorianus
aagcctcgtatttcacatttttcgg

SEQ ID NO: 187778 - DNA, 25 bp, Saccharomyces pastorianus
tttacgccgttgtagttaagcctcg

SEQ ID NO: 187779 - DNA, 25 bp, Saccharomyces pastorianus
agatttggtgactctcatctgcaca

SEQ ID NO: 187780 - DNA, 25 bp, Saccharomyces pastorianus
aaatacttccttcgctatatgtcaa

SEQ ID NO: 187781 - DNA, 25 bp, Saccharomyces pastorianus
cggatactccagtacgtgggtgcat

SEQ ID NO: 187782 - DNA, 25 bp, Saccharomyces pastorianus
ataccaaccaattcattccaccgaa

SEQ ID NO: 187783 - DNA, 25 bp, Saccharomyces pastorianus
gtagttccagtgaaacgaccaccaa

SEQ ID NO: 187784 - DNA, 25 bp, Saccharomyces pastorianus
gagattatctctgacagtgtcccag

SEQ ID NO: 187785 - DNA, 25 bp, Saccharomyces pastorianus
gggtgcatacgcctggtagtcccat

SEQ ID NO: 187786 - DNA, 25 bp, Saccharomyces pastorianus
aatcacgaagtttctcttgctcagg

SEQ ID NO: 187787 - DNA, 25 bp, Saccharomyces pastorianus
gttcttcctcaagcggtagtagttc

SEQ ID NO: 187788 - DNA, 25 bp, Saccharomyces pastorianus
ttcgggttacagatgccgtcgttca

SEQ ID NO: 187789 - DNA, 25 bp, Saccharomyces pastorianus
ggacctcctattcagagttttcaca

SEQ ID NO: 187790 - DNA, 25 bp, Saccharomyces pastorianus
ttctcgatgtaagttggacctccta

SEQ ID NO: 187791 - DNA, 25 bp, Saccharomyces pastorianus
ggtgatgggactagttcttcctcaa

SEQ ID NO: 187792 - DNA, 25 bp, Saccharomyces pastorianus
ctacgaccgaagcatggactggcac

SEQ ID NO: 187793 - DNA, 25 bp, Saccharomyces pastorianus
aactacgaccgaagcatggactggc

SEQ ID NO: 187794 - DNA, 25 bp, Saccharomyces pastorianus
acgaccgaagcatggactggcactt

SEQ ID NO: 187795 - DNA, 25 bp, Saccharomyces pastorianus
cacttttacatctacatccacagaa

SEQ ID NO: 187796 - DNA, 25 bp, Saccharomyces pastorianus
ataactacgaccgaagcatggactg

SEQ ID NO: 187797 - DNA, 25 bp, Saccharomyces pastorianus
gcacttttacatctacatccacaga

SEQ ID NO: 187798 - DNA, 25 bp, Saccharomyces pastorianus
tacgaccgaagcatggactggcact

SEQ ID NO: 187799 - DNA, 25 bp, Saccharomyces pastorianus
actacgaccgaagcatggactggca

SEQ ID NO: 187800 - DNA, 25 bp, Saccharomyces pastorianus
ggcacttttacatctacatccacag

SEQ ID NO: 187801 - DNA, 25 bp, Saccharomyces pastorianus
tggcacttttacatctacatccaca

SEQ ID NO: 187802 - DNA, 25 bp, Saccharomyces pastorianus
ggctgcgatcgtgttaagccgattt

SEQ ID NO: 187803 - DNA, 25 bp, Saccharomyces pastorianus
taagccgatttgtgggaactgtatg

SEQ ID NO: 187804 - DNA, 25 bp, Saccharomyces pastorianus
gccaagtagccaacggtccgtactt

SEQ ID NO: 187805 - DNA, 25 bp, Saccharomyces pastorianus
ttgcagaaaaatccagaactggctt

SEQ ID NO: 187806 - DNA, 25 bp, Saccharomyces pastorianus
aaaatggactgcttttatccggacg

SEQ ID NO: 187807 - DNA, 25 bp, Saccharomyces pastorianus
cctgcatgcgtgcagtgccgtaaga

SEQ ID NO: 187808 - DNA, 25 bp, Saccharomyces pastorianus
tatccggacgttcccggacaatacg

SEQ ID NO: 187809 - DNA, 25 bp, Saccharomyces pastorianus
caatacgttccctctagttcttcct

SEQ ID NO: 187810 - DNA, 25 bp, Saccharomyces pastorianus
taaactcttattacgcttctcgtcg

SEQ ID NO: 187811 - DNA, 25 bp, Saccharomyces pastorianus
ggaagataggctgcgatcgtgttaa

SEQ ID NO: 187812 - DNA, 25 bp, Saccharomyces pastorianus
cgtgcagtgccgtaagaggaagata

SEQ ID NO: 187813 - DNA, 25 bp, Saccharomyces pastorianus
aagcaacttcgaaataaacgctgaa

SEQ ID NO: 187814 - DNA, 25 bp, Saccharomyces pastorianus
accaccgcctggatacgaaatcgaa

SEQ ID NO: 187815 - DNA, 25 bp, Saccharomyces pastorianus
actggataatccgatggtgccatca

SEQ ID NO: 187816 - DNA, 25 bp, Saccharomyces pastorianus
caccgcctggatacgaaatcgaaga

SEQ ID NO: 187817 - DNA, 25 bp, Saccharomyces pastorianus
agaggacagcgacttagcacttcca

SEQ ID NO: 187818 - DNA, 25 bp, Saccharomyces pastorianus
aaatgaggatacattccttccgcct

SEQ ID NO: 187819 - DNA, 25 bp, Saccharomyces pastorianus
atggtgccatcatcggtaaatgagg

SEQ ID NO: 187820 - DNA, 25 bp, Saccharomyces pastorianus
acctcctccaagcaacttcgaaata

SEQ ID NO: 187821 - DNA, 25 bp, Saccharomyces pastorianus
tgaggatacattccttccgcctcca

SEQ ID NO: 187822 - DNA, 25 bp, Saccharomyces pastorianus
gatacgaaatcgaagaactggataa

SEQ ID NO: 187823 - DNA, 25 bp, Saccharomyces pastorianus
ggacagcgacttagcacttccacca

SEQ ID NO: 187824 - DNA, 25 bp, Saccharomyces pastorianus
taggttatctgccacaatattcacg

SEQ ID NO: 187825 - DNA, 25 bp, Saccharomyces pastorianus
taatcaataggttatctgccacaat

SEQ ID NO: 187826 - DNA, 25 bp, Saccharomyces pastorianus
ctgccacaatattcacgtctttgca

SEQ ID NO: 187827 - DNA, 25 bp, Saccharomyces pastorianus
tattttactgttgatccctcggata

SEQ ID NO: 187828 - DNA, 25 bp, Saccharomyces pastorianus
tgatccctcggataatcaataggtt

SEQ ID NO: 187829 - DNA, 25 bp, Saccharomyces pastorianus
tatctgccacaatattcacgtcttt

SEQ ID NO: 187830 - DNA, 25 bp, Saccharomyces pastorianus
tttattttactgttgatccctcgga

SEQ ID NO: 187831 - DNA, 25 bp, Saccharomyces pastorianus
actgttgatccctcggataatcaat

SEQ ID NO: 187832 - DNA, 25 bp, Saccharomyces pastorianus
tttactgttgatccctcggataatc

SEQ ID NO: 187833 - DNA, 25 bp, Saccharomyces pastorianus
gttatctgccacaatattcacgtct

SEQ ID NO: 187834 - DNA, 25 bp, Saccharomyces pastorianus
ccacaatattcacgtctttgcactc

SEQ ID NO: 187835 - DNA, 25 bp, Saccharomyces pastorianus
tccggaagaatttgtcggcgctctt

SEQ ID NO: 187836 - DNA, 25 bp, Saccharomyces pastorianus
gaagcattgcttaccagacagcgaa

SEQ ID NO: 187837 - DNA, 25 bp, Saccharomyces pastorianus
agcccacctcagaaagttcgtctaa

SEQ ID NO: 187838 - DNA, 25 bp, Saccharomyces pastorianus
gtattttcctcatcttgcaaaggct

SEQ ID NO: 187839 - DNA, 25 bp, Saccharomyces pastorianus
ggtcagaatacttgcctcgaagcat

SEQ ID NO: 187840 - DNA, 25 bp, Saccharomyces pastorianus
cccacaccaacggagtttgattttg

SEQ ID NO: 187841 - DNA, 25 bp, Saccharomyces pastorianus
gttcgtctaatgataagcgttcgga

SEQ ID NO: 187842 - DNA, 25 bp, Saccharomyces pastorianus
aattggatatggagcccacctcaga

SEQ ID NO: 187843 - DNA, 25 bp, Saccharomyces pastorianus
aaatctaccgtcatgattccggaag

SEQ ID NO: 187844 - DNA, 25 bp, Saccharomyces pastorianus
tagaaatccaaggtctgccatcctc

SEQ ID NO: 187845 - DNA, 25 bp, Saccharomyces pastorianus
ggccaaacttggctgcatatttccc

SEQ ID NO: 187846 - DNA, 25 bp, Saccharomyces pastorianus
agatggccaatccagacacacacat

SEQ ID NO: 187847 - DNA, 25 bp, Saccharomyces pastorianus
gacactaacgcttatatcgtcggtt

SEQ ID NO: 187848 - DNA, 25 bp, Saccharomyces pastorianus
tcccgatgatccaagagctgttatt

SEQ ID NO: 187849 - DNA, 25 bp, Saccharomyces pastorianus
tgcttacatgtacgctcccgatgat

SEQ ID NO: 187850 - DNA, 25 bp, Saccharomyces pastorianus
aagattgcctatacacccttgtgga

SEQ ID NO: 187851 - DNA, 25 bp, Saccharomyces pastorianus
atacacccttgtggagcgtggtatc

SEQ ID NO: 187852 - DNA, 25 bp, Saccharomyces pastorianus
ttgacggtcacagaaaacggttact

SEQ ID NO: 187853 - DNA, 25 bp, Saccharomyces pastorianus
taatgacagatgctcccgagattat

SEQ ID NO: 187854 - DNA, 25 bp, Saccharomyces pastorianus
gcagatgcacttatgcgcgatgcca

SEQ ID NO: 187855 - DNA, 25 bp, Saccharomyces pastorianus
acacacattgtttctttgacggtca

SEQ ID NO: 187856 - DNA, 25 bp, Saccharomyces pastorianus
gcgcgatgccatgaaggcccaagat

SEQ ID NO: 187857 - DNA, 25 bp, Saccharomyces pastorianus
attgtcgtttccgtcatggtcggga

SEQ ID NO: 187858 - DNA, 25 bp, Saccharomyces pastorianus
aaaattgtcgtttccgtcatggtcg

SEQ ID NO: 187859 - DNA, 25 bp, Saccharomyces pastorianus
ttttccgtgtcctggaacgttgtca

SEQ ID NO: 187860 - DNA, 25 bp, Saccharomyces pastorianus
aaattgtcgtttccgtcatggtcgg

SEQ ID NO: 187861 - DNA, 25 bp, Saccharomyces pastorianus
tgagttttccgtgtcctggaacgtt

SEQ ID NO: 187862 - DNA, 25 bp, Saccharomyces pastorianus
gtttccgtcatggtcgggaaaaatg

SEQ ID NO: 187863 - DNA, 25 bp, Saccharomyces pastorianus
gagttttccgtgtcctggaacgttg

SEQ ID NO: 187864 - DNA, 25 bp, Saccharomyces pastorianus
aatgtacaaaagttcctgacgtttg

SEQ ID NO: 187865 - DNA, 25 bp, Saccharomyces pastorianus
tgtcgtttccgtcatggtcgggaaa

SEQ ID NO: 187866 - DNA, 25 bp, Saccharomyces pastorianus
caaaagttcctgacgtttgttgaag

SEQ ID NO: 187867 - DNA, 25 bp, Saccharomyces pastorianus
gaaaaaattgtcgtttccgtcatgg

SEQ ID NO: 187868 - DNA, 25 bp, Saccharomyces pastorianus
caactgggccaagagacctattttt

SEQ ID NO: 187869 - DNA, 25 bp, Saccharomyces pastorianus
ttaaccaactgggccaagagaccta

SEQ ID NO: 187870 - DNA, 25 bp, Saccharomyces pastorianus
ccaactgggccaagagacctatttt

SEQ ID NO: 187871 - DNA, 25 bp, Saccharomyces pastorianus
aaccaactgggccaagagacctatt

SEQ ID NO: 187872 - DNA, 25 bp, Saccharomyces pastorianus
gccttaaccaactgggccaagagac

SEQ ID NO: 187873 - DNA, 25 bp, Saccharomyces pastorianus
accaactgggccaagagacctattt

SEQ ID NO: 187874 - DNA, 25 bp, Saccharomyces pastorianus
tgccttaaccaactgggccaagaga

SEQ ID NO: 187875 - DNA, 25 bp, Saccharomyces pastorianus
cttaaccaactgggccaagagacct

SEQ ID NO: 187876 - DNA, 25 bp, Saccharomyces pastorianus
tgggccaagagacctatttttttcg

SEQ ID NO: 187877 - DNA, 25 bp, Saccharomyces pastorianus
taaccaactgggccaagagacctat

SEQ ID NO: 187878 - DNA, 25 bp, Saccharomyces pastorianus
gggccatcacctgttggacatttta

SEQ ID NO: 187879 - DNA, 25 bp, Saccharomyces pastorianus
aaaggagattcacacgtacaacggg

SEQ ID NO: 187880 - DNA, 25 bp, Saccharomyces pastorianus
tactactacgtcaataaacctggag

SEQ ID NO: 187881 - DNA, 25 bp, Saccharomyces pastorianus
caacttcactattcctgtactatca

SEQ ID NO: 187882 - DNA, 25 bp, Saccharomyces pastorianus
attgtaggacggtaggtgccttaat

SEQ ID NO: 187883 - DNA, 25 bp, Saccharomyces pastorianus
gaaacaaatctcttgcaggctcgat

SEQ ID NO: 187884 - DNA, 25 bp, Saccharomyces pastorianus
gttcaactgggatgacaacttcact

SEQ ID NO: 187885 - DNA, 25 bp, Saccharomyces pastorianus
gctgcattgagcgaaggtattgatt

SEQ ID NO: 187886 - DNA, 25 bp, Saccharomyces pastorianus
cattgttcctactgagttggtccga

SEQ ID NO: 187887 - DNA, 25 bp, Saccharomyces pastorianus
agccgccgcgacgatcggaaggaaa

SEQ ID NO: 187888 - DNA, 25 bp, Saccharomyces pastorianus
gacgttactttgatatcattgttcc

SEQ ID NO: 187889 - DNA, 25 bp, Saccharomyces pastorianus
gattctattgatgttgaccaacctg

SEQ ID NO: 187890 - DNA, 25 bp, Saccharomyces pastorianus
atctgagggttgcattatttctgtc

SEQ ID NO: 187891 - DNA, 25 bp, Saccharomyces pastorianus
aaacagtttccacagatttcgatga

SEQ ID NO: 187892 - DNA, 25 bp, Saccharomyces pastorianus
aacattgccttgaaactttacgata

SEQ ID NO: 187893 - DNA, 25 bp, Saccharomyces pastorianus
atgggtaccaatccaaacgatattg

SEQ ID NO: 187894 - DNA, 25 bp, Saccharomyces pastorianus
ggacgccgttgcttataatggtaat

SEQ ID NO: 187895 - DNA, 25 bp, Saccharomyces pastorianus
ttaactaccctgtgttgattcgtcc

SEQ ID NO: 187896 - DNA, 25 bp, Saccharomyces pastorianus
gcattatttctgtcggtggtcaatt

SEQ ID NO: 187897 - DNA, 25 bp, Saccharomyces pastorianus
atgtcttggtacatgccatttccga

SEQ ID NO: 187898 - DNA, 25 bp, Saccharomyces pastorianus
taactttggcatctgacgtttctcc

SEQ ID NO: 187899 - DNA, 25 bp, Saccharomyces pastorianus
accacccagtcgtcatgtctaaatt

SEQ ID NO: 187900 - DNA, 25 bp, Saccharomyces pastorianus
ttatcatttgctttcgcatcgtcac

SEQ ID NO: 187901 - DNA, 25 bp, Saccharomyces pastorianus
attgtcacttgccactgtcgcctgc

SEQ ID NO: 187902 - DNA, 25 bp, Saccharomyces pastorianus
tgccaccgctattgccattatcatt

SEQ ID NO: 187903 - DNA, 25 bp, Saccharomyces pastorianus
gctctctaggctaacgtacgcattt

SEQ ID NO: 187904 - DNA, 25 bp, Saccharomyces pastorianus
tattgccattatcatttgctttcgc

SEQ ID NO: 187905 - DNA, 25 bp, Saccharomyces pastorianus
gccattatcatttgctttcgcatcg

SEQ ID NO: 187906 - DNA, 25 bp, Saccharomyces pastorianus
atcgtcaccgatttaaagctctcta

SEQ ID NO: 187907 - DNA, 25 bp, Saccharomyces pastorianus
atttgctttcgcatcgtcaccgatt

SEQ ID NO: 187908 - DNA, 25 bp, Saccharomyces pastorianus
gctttcgcatcgtcaccgatttaaa

SEQ ID NO: 187909 - DNA, 25 bp, Saccharomyces pastorianus
taaagctctctaggctaacgtacgc

SEQ ID NO: 187910 - DNA, 25 bp, Saccharomyces pastorianus
gtcaccgatttaaagctctctaggc

SEQ ID NO: 187911 - DNA, 25 bp, Saccharomyces pastorianus
tgcagcgggctgaaagtcgaatacc

SEQ ID NO: 187912 - DNA, 25 bp, Saccharomyces pastorianus
ccgtattgcacatgcagcgggctga

SEQ ID NO: 187913 - DNA, 25 bp, Saccharomyces pastorianus
gctgaaagtcgaatacctgaaggtc

SEQ ID NO: 187914 - DNA, 25 bp, Saccharomyces pastorianus
agctgcagtaccagtcgttcccttg

SEQ ID NO: 187915 - DNA, 25 bp, Saccharomyces pastorianus
tcgttcccttgggtccgatacaaga

SEQ ID NO: 187916 - DNA, 25 bp, Saccharomyces pastorianus
agccacagctgcagtaccagtcgtt

SEQ ID NO: 187917 - DNA, 25 bp, Saccharomyces pastorianus
tcccttgggtccgatacaagaccat

SEQ ID NO: 187918 - DNA, 25 bp, Saccharomyces pastorianus
cagtcgttcccttgggtccgataca

SEQ ID NO: 187919 - DNA, 25 bp, Saccharomyces pastorianus
gcgggctgaaagtcgaatacctgaa

SEQ ID NO: 187920 - DNA, 25 bp, Saccharomyces pastorianus
gtcgaatacctgaaggtcgaagagc

SEQ ID NO: 187921 - DNA, 25 bp, Saccharomyces pastorianus
gtattgcacatgcagcgggctgaaa

SEQ ID NO: 187922 - DNA, 25 bp, Saccharomyces pastorianus
ggtgcattgaccaagcaagttgctc

SEQ ID NO: 187923 - DNA, 25 bp, Saccharomyces pastorianus
gatattcatgttccactattgcctg

SEQ ID NO: 187924 - DNA, 25 bp, Saccharomyces pastorianus
tacttctccagtcggtccttattat

SEQ ID NO: 187925 - DNA, 25 bp, Saccharomyces pastorianus
atgcatcttacctcaactacaagct

SEQ ID NO: 187926 - DNA, 25 bp, Saccharomyces pastorianus
tgctgtcgtttcacctatcaaggaa

SEQ ID NO: 187927 - DNA, 25 bp, Saccharomyces pastorianus
actggtttcaaagccgtacgtcttg

SEQ ID NO: 187928 - DNA, 25 bp, Saccharomyces pastorianus
gaaggaattggttaccgctccatta

SEQ ID NO: 187929 - DNA, 25 bp, Saccharomyces pastorianus
ctctgttttaacattggctcgtgac

SEQ ID NO: 187930 - DNA, 25 bp, Saccharomyces pastorianus
acactattactgaagtcgccactag

SEQ ID NO: 187931 - DNA, 25 bp, Saccharomyces pastorianus
aaatctatggttgttcggcccagaa

SEQ ID NO: 187932 - DNA, 25 bp, Saccharomyces pastorianus
ggttggtactatgaacgtgttcttc

SEQ ID NO: 187933 - DNA, 25 bp, Saccharomyces pastorianus
atcctcttcgtcgtcaaacgcagcc

SEQ ID NO: 187934 - DNA, 25 bp, Saccharomyces pastorianus
gagaggcgttctcttcatccgcgtc

SEQ ID NO: 187935 - DNA, 25 bp, Saccharomyces pastorianus
ttctctgtacattgctgctccttct

SEQ ID NO: 187936 - DNA, 25 bp, Saccharomyces pastorianus
tcttagacgagaggcgttctcttca

SEQ ID NO: 187937 - DNA, 25 bp, Saccharomyces pastorianus
tgtacattgctgctccttctctttt

SEQ ID NO: 187938 - DNA, 25 bp, Saccharomyces pastorianus
gtcaaacgcagcctcctcttcttca

SEQ ID NO: 187939 - DNA, 25 bp, Saccharomyces pastorianus
attgctgctccttctctttttaaat

SEQ ID NO: 187940 - DNA, 25 bp, Saccharomyces pastorianus
agacgagaggcgttctcttcatccg

SEQ ID NO: 187941 - DNA, 25 bp, Saccharomyces pastorianus
tctctttttaaatttcttagacgag

SEQ ID NO: 187942 - DNA, 25 bp, Saccharomyces pastorianus
tcttctctgtacattgctgctcctt

SEQ ID NO: 187943 - DNA, 25 bp, Saccharomyces pastorianus
aatttcttagacgagaggcgttctc

SEQ ID NO: 187944 - DNA, 25 bp, Saccharomyces pastorianus
agtattatcatcaactatggttcca

SEQ ID NO: 187945 - DNA, 25 bp, Saccharomyces pastorianus
tggcctactcatgtcctggttacga

SEQ ID NO: 187946 - DNA, 25 bp, Saccharomyces pastorianus
tcgtgtgcactgtccgagggactga

SEQ ID NO: 187947 - DNA, 25 bp, Saccharomyces pastorianus
gtggtctttgtattaacgtgatctc

SEQ ID NO: 187948 - DNA, 25 bp, Saccharomyces pastorianus
gactgagttattcagagactatcgg

SEQ ID NO: 187949 - DNA, 25 bp, Saccharomyces pastorianus
tagtgcctcgtgtgcactgtccgag

SEQ ID NO: 187950 - DNA, 25 bp, Saccharomyces pastorianus
ggattagtgcctcgtgtgcactgtc

SEQ ID NO: 187951 - DNA, 25 bp, Saccharomyces pastorianus
ctgtccgagggactgagttattcag

SEQ ID NO: 187952 - DNA, 25 bp, Saccharomyces pastorianus
tctgtgggtgcctggattagtgcct

SEQ ID NO: 187953 - DNA, 25 bp, Saccharomyces pastorianus
taacgtgatctcagattcctggtct

SEQ ID NO: 187954 - DNA, 25 bp, Saccharomyces pastorianus
ccttctctgtgggtgcctggattag

SEQ ID NO: 187955 - DNA, 25 bp, Saccharomyces pastorianus
gattcgacaatactaccactgcaaa

SEQ ID NO: 187956 - DNA, 25 bp, Saccharomyces pastorianus
cgggttctggtaaatcgacgcaaat

SEQ ID NO: 187957 - DNA, 25 bp, Saccharomyces pastorianus
attgccggtttatcaacacaagagc

SEQ ID NO: 187958 - DNA, 25 bp, Saccharomyces pastorianus
atcctgttacagtgcttattggtga

SEQ ID NO: 187959 - DNA, 25 bp, Saccharomyces pastorianus
cgattaatttggctacccgtgttgc

SEQ ID NO: 187960 - DNA, 25 bp, Saccharomyces pastorianus
tgccctatatcaatgctaatcctgt

SEQ ID NO: 187961 - DNA, 25 bp, Saccharomyces pastorianus
acctcgtcgtgtggcagcgattaat

SEQ ID NO: 187962 - DNA, 25 bp, Saccharomyces pastorianus
gaccaagtgggttattctgttagat

SEQ ID NO: 187963 - DNA, 25 bp, Saccharomyces pastorianus
gaggacgatgatgtctccaacagac

SEQ ID NO: 187964 - DNA, 25 bp, Saccharomyces pastorianus
gaaacacggatccattgctgtcact

SEQ ID NO: 187965 - DNA, 25 bp, Saccharomyces pastorianus
gacgcaaattccacagttcattttg

SEQ ID NO: 187966 - DNA, 25 bp, Saccharomyces pastorianus
cgctgttagatacggttctgagaaa

SEQ ID NO: 187967 - DNA, 25 bp, Saccharomyces pastorianus
agacttgattaggaacgctgttaga

SEQ ID NO: 187968 - DNA, 25 bp, Saccharomyces pastorianus
ttagatacggttctgagaaacctca

SEQ ID NO: 187969 - DNA, 25 bp, Saccharomyces pastorianus
atatctggatcgatcatggaagact

SEQ ID NO: 187970 - DNA, 25 bp, Saccharomyces pastorianus
ggaagacttgattaggaacgctgtt

SEQ ID NO: 187971 - DNA, 25 bp, Saccharomyces pastorianus
tctggatcgatcatggaagacttga

SEQ ID NO: 187972 - DNA, 25 bp, Saccharomyces pastorianus
attaggaacgctgttagatacggtt

SEQ ID NO: 187973 - DNA, 25 bp, Saccharomyces pastorianus
tcttaatgatgtcgtagagactgtt

SEQ ID NO: 187974 - DNA, 25 bp, Saccharomyces pastorianus
atatcgcacgatgatcttaatgatg

SEQ ID NO: 187975 - DNA, 25 bp, Saccharomyces pastorianus
cgatgatcttaatgatgtcgtagag

SEQ ID NO: 187976 - DNA, 25 bp, Saccharomyces pastorianus
aacgctgttagatacggttctgaga

SEQ ID NO: 187977 - DNA, 25 bp, Saccharomyces pastorianus
aggattcctcgaaatggaatctata

SEQ ID NO: 187978 - DNA, 25 bp, Saccharomyces pastorianus
taggattcctcgaaatggaatctat

SEQ ID NO: 187979 - DNA, 25 bp, Saccharomyces pastorianus
ataggattcctcgaaatggaatcta

SEQ ID NO: 187980 - DNA, 25 bp, Saccharomyces pastorianus
ggattcctcgaaatggaatctatat

SEQ ID NO: 187981 - DNA, 25 bp, Saccharomyces pastorianus
gattcctcgaaatggaatctatatt

SEQ ID NO: 187982 - DNA, 25 bp, Saccharomyces pastorianus
cgatgatataggattcctcgaaatg

SEQ ID NO: 187983 - DNA, 25 bp, Saccharomyces pastorianus
ctcgatgatataggattcctcgaaa

SEQ ID NO: 187984 - DNA, 25 bp, Saccharomyces pastorianus
atgatataggattcctcgaaatgga

SEQ ID NO: 187985 - DNA, 25 bp, Saccharomyces pastorianus
tgatataggattcctcgaaatggaa

SEQ ID NO: 187986 - DNA, 25 bp, Saccharomyces pastorianus
tcgatgatataggattcctcgaaat

SEQ ID NO: 187987 - DNA, 25 bp, Saccharomyces pastorianus
gatgatataggattcctcgaaatgg

SEQ ID NO: 187988 - DNA, 25 bp, Saccharomyces pastorianus
gggactttggaaatacatccaagaa

SEQ ID NO: 187989 - DNA, 25 bp, Saccharomyces pastorianus
gactttggaaatacatccaagaagc

SEQ ID NO: 187990 - DNA, 25 bp, Saccharomyces pastorianus
tgtgtgggttattaaacgtgggact

SEQ ID NO: 187991 - DNA, 25 bp, Saccharomyces pastorianus
ggactttggaaatacatccaagaag

SEQ ID NO: 187992 - DNA, 25 bp, Saccharomyces pastorianus
acgtgggactttggaaatacatcca

SEQ ID NO: 187993 - DNA, 25 bp, Saccharomyces pastorianus
gtgggactttggaaatacatccaag

SEQ ID NO: 187994 - DNA, 25 bp, Saccharomyces pastorianus
tttggaaatacatccaagaagcaca

SEQ ID NO: 187995 - DNA, 25 bp, Saccharomyces pastorianus
ctttggaaatacatccaagaagcac

SEQ ID NO: 187996 - DNA, 25 bp, Saccharomyces pastorianus
cgtgggactttggaaatacatccaa

SEQ ID NO: 187997 - DNA, 25 bp, Saccharomyces pastorianus
ttggaaatacatccaagaagcacaa

SEQ ID NO: 187998 - DNA, 25 bp, Saccharomyces pastorianus
tgggactttggaaatacatccaaga

SEQ ID NO: 187999 - DNA, 25 bp, Saccharomyces pastorianus
gcgtactataatgtgtgcgatgcca

SEQ ID NO: 188000 - DNA, 25 bp, Saccharomyces pastorianus
ggctcaaatatacagacaggtattc

SEQ ID NO: 188001 - DNA, 25 bp, Saccharomyces pastorianus
tattctggcgtactataatgtgtgc

SEQ ID NO: 188002 - DNA, 25 bp, Saccharomyces pastorianus
actataatgtgtgcgatgccatcga

SEQ ID NO: 188003 - DNA, 25 bp, Saccharomyces pastorianus
gagacatggctcaaatatacagaca

SEQ ID NO: 188004 - DNA, 25 bp, Saccharomyces pastorianus
tctggcgtactataatgtgtgcgat

SEQ ID NO: 188005 - DNA, 25 bp, Saccharomyces pastorianus
gacaggtattctggcgtactataat

SEQ ID NO: 188006 - DNA, 25 bp, Saccharomyces pastorianus
catggctcaaatatacagacaggta

SEQ ID NO: 188007 - DNA, 25 bp, Saccharomyces pastorianus
tggctcaaatatacagacaggtatt

SEQ ID NO: 188008 - DNA, 25 bp, Saccharomyces pastorianus
atggctcaaatatacagacaggtat

SEQ ID NO: 188009 - DNA, 25 bp, Saccharomyces pastorianus
aatgtgtgcgatgccatcgagcaag

SEQ ID NO: 188010 - DNA, 25 bp, Saccharomyces pastorianus
ggcggctacgcataccagtacgtgg

SEQ ID NO: 188011 - DNA, 25 bp, Saccharomyces pastorianus
agaaacgtgaccgtgctgcgaaaga

SEQ ID NO: 188012 - DNA, 25 bp, Saccharomyces pastorianus
cgttccattgcgactacatcgaggt

SEQ ID NO: 188013 - DNA, 25 bp, Saccharomyces pastorianus
caagagctcgccatggtggatccgc

SEQ ID NO: 188014 - DNA, 25 bp, Saccharomyces pastorianus
atccagaacctggtgcgcaagctga

SEQ ID NO: 188015 - DNA, 25 bp, Saccharomyces pastorianus
tgacgctggacttggagctggacct

SEQ ID NO: 188016 - DNA, 25 bp, Saccharomyces pastorianus
aaacagtctcaagcgcaagcagctc

SEQ ID NO: 188017 - DNA, 25 bp, Saccharomyces pastorianus
gcgagcgagctgtctggtttcagaa

SEQ ID NO: 188018 - DNA, 25 bp, Saccharomyces pastorianus
tacatcgaggtgaacgcgtgccccg

SEQ ID NO: 188019 - DNA, 25 bp, Saccharomyces pastorianus
gacatcgtcgagtaccgcctgcaga

SEQ ID NO: 188020 - DNA, 25 bp, Saccharomyces pastorianus
tggacttgaagtctctcccgctgga

SEQ ID NO: 188021 - DNA, 25 bp, Saccharomyces pastorianus
tatacccaggaaaggctaagtcgca

SEQ ID NO: 188022 - DNA, 25 bp, Saccharomyces pastorianus
tattcttggagctttctacgccttg

SEQ ID NO: 188023 - DNA, 25 bp, Saccharomyces pastorianus
ctacgccttgcctatttttcagaga

SEQ ID NO: 188024 - DNA, 25 bp, Saccharomyces pastorianus
tgttcatgttgagttcagtccggat

SEQ ID NO: 188025 - DNA, 25 bp, Saccharomyces pastorianus
ggacggcttagatattgttcatgtt

SEQ ID NO: 188026 - DNA, 25 bp, Saccharomyces pastorianus
agggtacgacacagctattcttgga

SEQ ID NO: 188027 - DNA, 25 bp, Saccharomyces pastorianus
agcttggtcactattggtctctaca

SEQ ID NO: 188028 - DNA, 25 bp, Saccharomyces pastorianus
agagatatttgacgctactgaggat

SEQ ID NO: 188029 - DNA, 25 bp, Saccharomyces pastorianus
gttcagtccggatacaagagcgcca

SEQ ID NO: 188030 - DNA, 25 bp, Saccharomyces pastorianus
ctaagtcgcatgaacccagctggat

SEQ ID NO: 188031 - DNA, 25 bp, Saccharomyces pastorianus
aagtgactcgaatgtatacccagga

SEQ ID NO: 188032 - DNA, 25 bp, Saccharomyces pastorianus
gactcggacgtagacgatgatgctg

SEQ ID NO: 188033 - DNA, 25 bp, Saccharomyces pastorianus
agttgaagctgtagaggtgattgtc

SEQ ID NO: 188034 - DNA, 25 bp, Saccharomyces pastorianus
agaagtggacgatggtgtagatgaa

SEQ ID NO: 188035 - DNA, 25 bp, Saccharomyces pastorianus
tgacgactcggacgtagacgatgat

SEQ ID NO: 188036 - DNA, 25 bp, Saccharomyces pastorianus
ttgaagctgtagaggtgattgtcga

SEQ ID NO: 188037 - DNA, 25 bp, Saccharomyces pastorianus
gatgttgatgacgactcggacgtag

SEQ ID NO: 188038 - DNA, 25 bp, Saccharomyces pastorianus
ggacgtagacgatgatgctgaagac

SEQ ID NO: 188039 - DNA, 25 bp, Saccharomyces pastorianus
aaagatgttgatgacgactcggacg

SEQ ID NO: 188040 - DNA, 25 bp, Saccharomyces pastorianus
gatgacgactcggacgtagacgatg

SEQ ID NO: 188041 - DNA, 25 bp, Saccharomyces pastorianus
cgatgatgctgaagacgttgaggtt

SEQ ID NO: 188042 - DNA, 25 bp, Saccharomyces pastorianus
gttgatgacgactcggacgtagacg

SEQ ID NO: 188043 - DNA, 25 bp, Saccharomyces pastorianus
tgcttttagggctaattcccttgcc

SEQ ID NO: 188044 - DNA, 25 bp, Saccharomyces pastorianus
tacctggttctactatgggatctac

SEQ ID NO: 188045 - DNA, 25 bp, Saccharomyces pastorianus
gagcgtaggttcattttcgtctaaa

SEQ ID NO: 188046 - DNA, 25 bp, Saccharomyces pastorianus
ctggctagtgctatggttgctgatc

SEQ ID NO: 188047 - DNA, 25 bp, Saccharomyces pastorianus
gtattgcgctaccaaaggacgtttt

SEQ ID NO: 188048 - DNA, 25 bp, Saccharomyces pastorianus
attggctttatcctttcatggcttc

SEQ ID NO: 188049 - DNA, 25 bp, Saccharomyces pastorianus
tgggatctacaagtcattcgccttt

SEQ ID NO: 188050 - DNA, 25 bp, Saccharomyces pastorianus
catggcttccagatttgtgctttta

SEQ ID NO: 188051 - DNA, 25 bp, Saccharomyces pastorianus
aattcccttgccctatattgtaaag

SEQ ID NO: 188052 - DNA, 25 bp, Saccharomyces pastorianus
attcgcctttcgtatctggctagtg

SEQ ID NO: 188053 - DNA, 25 bp, Saccharomyces pastorianus
gtcttgaaacccaaagtattgcgct

SEQ ID NO: 188054 - DNA, 25 bp, Saccharomyces pastorianus
ggaggatataacacgccttcaccac

SEQ ID NO: 188055 - DNA, 25 bp, Saccharomyces pastorianus
gaaattcgattctgtgccggttgat

SEQ ID NO: 188056 - DNA, 25 bp, Saccharomyces pastorianus
ggttgatgcatcctcgatcgaattt

SEQ ID NO: 188057 - DNA, 25 bp, Saccharomyces pastorianus
attagcagtcatgtgcctgcgaacg

SEQ ID NO: 188058 - DNA, 25 bp, Saccharomyces pastorianus
gttcgacaacttcatcattcggagg

SEQ ID NO: 188059 - DNA, 25 bp, Saccharomyces pastorianus
atggcagtaccaacacaccgcaatt

SEQ ID NO: 188060 - DNA, 25 bp, Saccharomyces pastorianus
gaaaattccatgattccttcccgat

SEQ ID NO: 188061 - DNA, 25 bp, Saccharomyces pastorianus
aattgagtcttaccccatatgcaaa

SEQ ID NO: 188062 - DNA, 25 bp, Saccharomyces pastorianus
agcttccgtgcagcaaagttcgaca

SEQ ID NO: 188063 - DNA, 25 bp, Saccharomyces pastorianus
actggacaggttcattgccgcatac

SEQ ID NO: 188064 - DNA, 25 bp, Saccharomyces pastorianus
ttcttcgcacttatcctctaatgaa

SEQ ID NO: 188065 - DNA, 25 bp, Saccharomyces pastorianus
tcgaggagaacttttagtactttct

SEQ ID NO: 188066 - DNA, 25 bp, Saccharomyces pastorianus
tattattgccttattaaaaatggaa

SEQ ID NO: 188067 - DNA, 25 bp, Saccharomyces pastorianus
ggagaacttttagtactttctacat

SEQ ID NO: 188068 - DNA, 25 bp, Saccharomyces pastorianus
tgccttattaaaaatggaatcccaa

SEQ ID NO: 188069 - DNA, 25 bp, Saccharomyces pastorianus
tattgccttattaaaaatggaatcc

SEQ ID NO: 188070 - DNA, 25 bp, Saccharomyces pastorianus
gagaacttttagtactttctacata

SEQ ID NO: 188071 - DNA, 25 bp, Saccharomyces pastorianus
atattattgccttattaaaaatgga

SEQ ID NO: 188072 - DNA, 25 bp, Saccharomyces pastorianus
ttattgccttattaaaaatggaatc

SEQ ID NO: 188073 - DNA, 25 bp, Saccharomyces pastorianus
attattgccttattaaaaatggaat

SEQ ID NO: 188074 - DNA, 25 bp, Saccharomyces pastorianus
ttgccttattaaaaatggaatccca

SEQ ID NO: 188075 - DNA, 25 bp, Saccharomyces pastorianus
ttttagtactttctacatacctaat

SEQ ID NO: 188076 - DNA, 25 bp, Saccharomyces pastorianus
cagcctgataaggtttttgagctca

SEQ ID NO: 188077 - DNA, 25 bp, Saccharomyces pastorianus
acatgtacgaactctaagggactta

SEQ ID NO: 188078 - DNA, 25 bp, Saccharomyces pastorianus
tattccctaaacgtctgattgtgtg

SEQ ID NO: 188079 - DNA, 25 bp, Saccharomyces pastorianus
caaagtttattgtacctctaatgag

SEQ ID NO: 188080 - DNA, 25 bp, Saccharomyces pastorianus
tatcacaatttgtcctctacctgcc

SEQ ID NO: 188081 - DNA, 25 bp, Saccharomyces pastorianus
tacctgccagccacaacatgtacga

SEQ ID NO: 188082 - DNA, 25 bp, Saccharomyces pastorianus
gaatttctgcgattgatttcgtacc

SEQ ID NO: 188083 - DNA, 25 bp, Saccharomyces pastorianus
tttggtggacacatttcagcctgat

SEQ ID NO: 188084 - DNA, 25 bp, Saccharomyces pastorianus
gatttcgtacctgacaattgacatg

SEQ ID NO: 188085 - DNA, 25 bp, Saccharomyces pastorianus
gtgattggaggatccagtactgcaa

SEQ ID NO: 188086 - DNA, 25 bp, Saccharomyces pastorianus
gtcgaatgaattcactgatccaagt

SEQ ID NO: 188087 - DNA, 25 bp, Saccharomyces pastorianus
gttttgctctcttccgagtctttaa

SEQ ID NO: 188088 - DNA, 25 bp, Saccharomyces pastorianus
tcctgtgacgcggtcttcaatgata

SEQ ID NO: 188089 - DNA, 25 bp, Saccharomyces pastorianus
ttttctcggcaggtttagcactttc

SEQ ID NO: 188090 - DNA, 25 bp, Saccharomyces pastorianus
agacgactttcgatgtcactagcat

SEQ ID NO: 188091 - DNA, 25 bp, Saccharomyces pastorianus
caacatatctcattccaactctggt

SEQ ID NO: 188092 - DNA, 25 bp, Saccharomyces pastorianus
ttcttcatgtttccttttactgtcc

SEQ ID NO: 188093 - DNA, 25 bp, Saccharomyces pastorianus
agatcgtcatcaccggaacttagtt

SEQ ID NO: 188094 - DNA, 25 bp, Saccharomyces pastorianus
tactgtccttcttgttgtttttctt

SEQ ID NO: 188095 - DNA, 25 bp, Saccharomyces pastorianus
tgataataccgccttccagtagctt

SEQ ID NO: 188096 - DNA, 25 bp, Saccharomyces pastorianus
agtctttaactttctctgctttctt

SEQ ID NO: 188097 - DNA, 25 bp, Saccharomyces pastorianus
aactctggtaccctttttggcatgt

SEQ ID NO: 188098 - DNA, 25 bp, Saccharomyces pastorianus
ggtttgggtgttgcggctatttatc

SEQ ID NO: 188099 - DNA, 25 bp, Saccharomyces pastorianus
agcgaaatcactgttgcatgtctca

SEQ ID NO: 188100 - DNA, 25 bp, Saccharomyces pastorianus
cggttccacatatcgctaagctaaa

SEQ ID NO: 188101 - DNA, 25 bp, Saccharomyces pastorianus
tgcgggccagcaacgtttaacgacg

SEQ ID NO: 188102 - DNA, 25 bp, Saccharomyces pastorianus
gtgcgctcggaaataaaactctcag

SEQ ID NO: 188103 - DNA, 25 bp, Saccharomyces pastorianus
gctatttatccgcactttgtcgaat

SEQ ID NO: 188104 - DNA, 25 bp, Saccharomyces pastorianus
gtggtccaaggtatagactcttcct

SEQ ID NO: 188105 - DNA, 25 bp, Saccharomyces pastorianus
tattaccttttattcctgcgggcca

SEQ ID NO: 188106 - DNA, 25 bp, Saccharomyces pastorianus
ggcccatatggtgtaacggttccac

SEQ ID NO: 188107 - DNA, 25 bp, Saccharomyces pastorianus
tttacggttaccatctactgatcaa

SEQ ID NO: 188108 - DNA, 25 bp, Saccharomyces pastorianus
gattgttaatgacctatcccatttg

SEQ ID NO: 188109 - DNA, 25 bp, Saccharomyces pastorianus
cttcttacaccgcatatgataatac

SEQ ID NO: 188110 - DNA, 25 bp, Saccharomyces pastorianus
tcagcttccattatatttgatgact

SEQ ID NO: 188111 - DNA, 25 bp, Saccharomyces pastorianus
cagcttccattatatttgatgactg

SEQ ID NO: 188112 - DNA, 25 bp, Saccharomyces pastorianus
tatatttgatgactgtttctcaatc

SEQ ID NO: 188113 - DNA, 25 bp, Saccharomyces pastorianus
ttatatttgatgactgtttctcaat

SEQ ID NO: 188114 - DNA, 25 bp, Saccharomyces pastorianus
tcttacaccgcatatgataatacat

SEQ ID NO: 188115 - DNA, 25 bp, Saccharomyces pastorianus
tttcagcttccattatatttgatga

SEQ ID NO: 188116 - DNA, 25 bp, Saccharomyces pastorianus
ttcttacaccgcatatgataataca

SEQ ID NO: 188117 - DNA, 25 bp, Saccharomyces pastorianus
tccattatatttgatgactgtttct

SEQ ID NO: 188118 - DNA, 25 bp, Saccharomyces pastorianus
caatctttatgccatcttcttacac

SEQ ID NO: 188119 - DNA, 25 bp, Saccharomyces pastorianus
attatatttgatgactgtttctcaa

SEQ ID NO: 188120 - DNA, 25 bp, Saccharomyces pastorianus
gtagcctgtatcaccagagacttgt

SEQ ID NO: 188121 - DNA, 25 bp, Saccharomyces pastorianus
gtgacgaacatcagtccgaatatgt

SEQ ID NO: 188122 - DNA, 25 bp, Saccharomyces pastorianus
gaagacccaatcacttggcaagaat

SEQ ID NO: 188123 - DNA, 25 bp, Saccharomyces pastorianus
ggatcggccggtgtagcctgtatca

SEQ ID NO: 188124 - DNA, 25 bp, Saccharomyces pastorianus
attgcgagatcaaaggcgcgccttc

SEQ ID NO: 188125 - DNA, 25 bp, Saccharomyces pastorianus
tatattgtgcccagttgtgacgaac

SEQ ID NO: 188126 - DNA, 25 bp, Saccharomyces pastorianus
atttcaacgatgaccatccggatgg

SEQ ID NO: 188127 - DNA, 25 bp, Saccharomyces pastorianus
gagctggttcccgtggaggaaaact

SEQ ID NO: 188128 - DNA, 25 bp, Saccharomyces pastorianus
aaaggcgcgccttcatttcagggtt

SEQ ID NO: 188129 - DNA, 25 bp, Saccharomyces pastorianus
gaaactctacctgaaaggccttgta

SEQ ID NO: 188130 - DNA, 25 bp, Saccharomyces pastorianus
tcatttcagggttttccggatcggc

SEQ ID NO: 188131 - DNA, 25 bp, Saccharomyces pastorianus
aagtcggtagcagctgacaaatctt

SEQ ID NO: 188132 - DNA, 25 bp, Saccharomyces pastorianus
actgcagtcaaagacatcccattga

SEQ ID NO: 188133 - DNA, 25 bp, Saccharomyces pastorianus
tcaccattcatgttactgcagtcaa

SEQ ID NO: 188134 - DNA, 25 bp, Saccharomyces pastorianus
gacgaaagtgctgccatcaacggtt

SEQ ID NO: 188135 - DNA, 25 bp, Saccharomyces pastorianus
ggcacatgagccaacaaaacatttt

SEQ ID NO: 188136 - DNA, 25 bp, Saccharomyces pastorianus
tttacttactgttagcgactttgct

SEQ ID NO: 188137 - DNA, 25 bp, Saccharomyces pastorianus
aatttggacttcaactggcacatga

SEQ ID NO: 188138 - DNA, 25 bp, Saccharomyces pastorianus
atgtcacttctgtgtcctggatcaa

SEQ ID NO: 188139 - DNA, 25 bp, Saccharomyces pastorianus
gacaaatcttattctgacctcgtta

SEQ ID NO: 188140 - DNA, 25 bp, Saccharomyces pastorianus
ccatcaacggttgtcccaatttgga

SEQ ID NO: 188141 - DNA, 25 bp, Saccharomyces pastorianus
agacaacgtttaccaaatcaccatt

SEQ ID NO: 188142 - DNA, 25 bp, Saccharomyces pastorianus
gtcaagaccgtcatttgtatgcaat

SEQ ID NO: 188143 - DNA, 25 bp, Saccharomyces pastorianus
gagtctgcacatcattcacaacatc

SEQ ID NO: 188144 - DNA, 25 bp, Saccharomyces pastorianus
aagcactactagtcatggatcgtat

SEQ ID NO: 188145 - DNA, 25 bp, Saccharomyces pastorianus
gtgaagaatctatatccatcgttgt

SEQ ID NO: 188146 - DNA, 25 bp, Saccharomyces pastorianus
atggttcaaaggcatactaccgtta

SEQ ID NO: 188147 - DNA, 25 bp, Saccharomyces pastorianus
tcgttgtatcttccaaacataggca

SEQ ID NO: 188148 - DNA, 25 bp, Saccharomyces pastorianus
gaatacccagtgatggacctatttc

SEQ ID NO: 188149 - DNA, 25 bp, Saccharomyces pastorianus
atcaggccgaagctctagacttttt

SEQ ID NO: 188150 - DNA, 25 bp, Saccharomyces pastorianus
actaccgttaccaccattatatcat

SEQ ID NO: 188151 - DNA, 25 bp, Saccharomyces pastorianus
tttggccccgtgactgctaatgggt

SEQ ID NO: 188152 - DNA, 25 bp, Saccharomyces pastorianus
agaatgctccatgggattgggtcaa

SEQ ID NO: 188153 - DNA, 25 bp, Saccharomyces pastorianus
gagaccaatttggatcgaaagttaa

SEQ ID NO: 188154 - DNA, 25 bp, Saccharomyces pastorianus
caagagaccaatttggatcgaaagt

SEQ ID NO: 188155 - DNA, 25 bp, Saccharomyces pastorianus
caactgggccaagagaccaatttgg

SEQ ID NO: 188156 - DNA, 25 bp, Saccharomyces pastorianus
ccaactgggccaagagaccaatttg

SEQ ID NO: 188157 - DNA, 25 bp, Saccharomyces pastorianus
ccaatttggatcgaaagttaaccat

SEQ ID NO: 188158 - DNA, 25 bp, Saccharomyces pastorianus
aaccaactgggccaagagaccaatt

SEQ ID NO: 188159 - DNA, 25 bp, Saccharomyces pastorianus
accaactgggccaagagaccaattt

SEQ ID NO: 188160 - DNA, 25 bp, Saccharomyces pastorianus
agagaccaatttggatcgaaagtta

SEQ ID NO: 188161 - DNA, 25 bp, Saccharomyces pastorianus
caatttggatcgaaagttaaccatt

SEQ ID NO: 188162 - DNA, 25 bp, Saccharomyces pastorianus
ccaagagaccaatttggatcgaaag

SEQ ID NO: 188163 - DNA, 25 bp, Saccharomyces pastorianus
aagagaccaatttggatcgaaagtt

SEQ ID NO: 188164 - DNA, 25 bp, Saccharomyces pastorianus
aacgccctttctgccttaaatatag

SEQ ID NO: 188165 - DNA, 25 bp, Saccharomyces pastorianus
aaacctttacttgttgcagctccag

SEQ ID NO: 188166 - DNA, 25 bp, Saccharomyces pastorianus
cttgccggacaatcttacatggaca

SEQ ID NO: 188167 - DNA, 25 bp, Saccharomyces pastorianus
aatcctgctgctttaaatgacgtca

SEQ ID NO: 188168 - DNA, 25 bp, Saccharomyces pastorianus
agtaaatgacttcgatcccaccata

SEQ ID NO: 188169 - DNA, 25 bp, Saccharomyces pastorianus
gactacatgtattccgatccagata

SEQ ID NO: 188170 - DNA, 25 bp, Saccharomyces pastorianus
atgacgtcagcgatggagacctaac

SEQ ID NO: 188171 - DNA, 25 bp, Saccharomyces pastorianus
atcaaattctgctgttccggagaca

SEQ ID NO: 188172 - DNA, 25 bp, Saccharomyces pastorianus
gaaatggagatctagcttgccggac

SEQ ID NO: 188173 - DNA, 25 bp, Saccharomyces pastorianus
gactggcgtttaggattgtccatga

SEQ ID NO: 188174 - DNA, 25 bp, Saccharomyces pastorianus
gcatggtatttttcaggactggcgt

SEQ ID NO: 188175 - DNA, 25 bp, Saccharomyces pastorianus
gatcgtccctgtctttcaattaata

SEQ ID NO: 188176 - DNA, 25 bp, Saccharomyces pastorianus
gctttcaaagcgaccgtattctttt

SEQ ID NO: 188177 - DNA, 25 bp, Saccharomyces pastorianus
ggttgcttttgattgtacgctcatt

SEQ ID NO: 188178 - DNA, 25 bp, Saccharomyces pastorianus
gtgaaaagccttttgagtgcgtaca

SEQ ID NO: 188179 - DNA, 25 bp, Saccharomyces pastorianus
aaacactgacgctttgctaaactcc

SEQ ID NO: 188180 - DNA, 25 bp, Saccharomyces pastorianus
atcggcgaattgtcgttcttaaaag

SEQ ID NO: 188181 - DNA, 25 bp, Saccharomyces pastorianus
tccctgtttgaattgatcgtccctg

SEQ ID NO: 188182 - DNA, 25 bp, Saccharomyces pastorianus
gaggtttacgctcaaaattctaact

SEQ ID NO: 188183 - DNA, 25 bp, Saccharomyces pastorianus
tgctaaactccaccacagaacatat

SEQ ID NO: 188184 - DNA, 25 bp, Saccharomyces pastorianus
tcgaacggcgtttccctgtttgaat

SEQ ID NO: 188185 - DNA, 25 bp, Saccharomyces pastorianus
tattctttttaattcgtgtggccga

SEQ ID NO: 188186 - DNA, 25 bp, Saccharomyces pastorianus
caatgcgtttgggatagcgtagata

SEQ ID NO: 188187 - DNA, 25 bp, Saccharomyces pastorianus
tcgagcaatgcgtttgggatagcgt

SEQ ID NO: 188188 - DNA, 25 bp, Saccharomyces pastorianus
atagatatgcttccaccacggttgt

SEQ ID NO: 188189 - DNA, 25 bp, Saccharomyces pastorianus
gcgtagatagatatgcttccaccac

SEQ ID NO: 188190 - DNA, 25 bp, Saccharomyces pastorianus
acggttgtgccagtgagtacgctaa

SEQ ID NO: 188191 - DNA, 25 bp, Saccharomyces pastorianus
aaggcgatggccaaacaaaagagaa

SEQ ID NO: 188192 - DNA, 25 bp, Saccharomyces pastorianus
ttcccaatgttgtcgagcaatgcgt

SEQ ID NO: 188193 - DNA, 25 bp, Saccharomyces pastorianus
tgcctgtatggcagaaaacttccca

SEQ ID NO: 188194 - DNA, 25 bp, Saccharomyces pastorianus
ggcagaaaacttcccaatgttgtcg

SEQ ID NO: 188195 - DNA, 25 bp, Saccharomyces pastorianus
ttccaccacggttgtgccagtgagt

SEQ ID NO: 188196 - DNA, 25 bp, Saccharomyces pastorianus
gagtacgctaaaggcgatggccaaa

SEQ ID NO: 188197 - DNA, 25 bp, Saccharomyces pastorianus
ggcataagcccaaaccatgctaggc

SEQ ID NO: 188198 - DNA, 25 bp, Saccharomyces pastorianus
gacaataaacctattggttcgggtg

SEQ ID NO: 188199 - DNA, 25 bp, Saccharomyces pastorianus
agcaagatacggatgttgccccttc

SEQ ID NO: 188200 - DNA, 25 bp, Saccharomyces pastorianus
cagtcaccattttcccaacgagaat

SEQ ID NO: 188201 - DNA, 25 bp, Saccharomyces pastorianus
gtccacttgacggataatttcgtat

SEQ ID NO: 188202 - DNA, 25 bp, Saccharomyces pastorianus
aacaatatagtgtccacttgacgga

SEQ ID NO: 188203 - DNA, 25 bp, Saccharomyces pastorianus
gtttataatccatacggcataagcc

SEQ ID NO: 188204 - DNA, 25 bp, Saccharomyces pastorianus
cgaacgattttttgcccgaagatat

SEQ ID NO: 188205 - DNA, 25 bp, Saccharomyces pastorianus
gcatttgcagacactctgaatacga

SEQ ID NO: 188206 - DNA, 25 bp, Saccharomyces pastorianus
cttccaattgctaatccgaacgatt

SEQ ID NO: 188207 - DNA, 25 bp, Saccharomyces pastorianus
gatgttgccccttccaattgctaat

SEQ ID NO: 188208 - DNA, 25 bp, Saccharomyces pastorianus
tcattgtagatgagtttcacaactt

SEQ ID NO: 188209 - DNA, 25 bp, Saccharomyces pastorianus
caggatagctgcgtgggagaatatt

SEQ ID NO: 188210 - DNA, 25 bp, Saccharomyces pastorianus
ttgtagatgagtttcacaactttga

SEQ ID NO: 188211 - DNA, 25 bp, Saccharomyces pastorianus
ctcattgtagatgagtttcacaact

SEQ ID NO: 188212 - DNA, 25 bp, Saccharomyces pastorianus
ggagaatattgttgagtgcaccttt

SEQ ID NO: 188213 - DNA, 25 bp, Saccharomyces pastorianus
attgtagatgagtttcacaactttg

SEQ ID NO: 188214 - DNA, 25 bp, Saccharomyces pastorianus
gatagctgcgtgggagaatattgtt

SEQ ID NO: 188215 - DNA, 25 bp, Saccharomyces pastorianus
tgtagatgagtttcacaactttgaa

SEQ ID NO: 188216 - DNA, 25 bp, Saccharomyces pastorianus
tgcacctttaggaccaacaacgtaa

SEQ ID NO: 188217 - DNA, 25 bp, Saccharomyces pastorianus
cattgtagatgagtttcacaacttt

SEQ ID NO: 188218 - DNA, 25 bp, Saccharomyces pastorianus
cctcattgtagatgagtttcacaac

SEQ ID NO: 188219 - DNA, 25 bp, Saccharomyces pastorianus
tccctggcacagtactacgacatga

SEQ ID NO: 188220 - DNA, 25 bp, Saccharomyces pastorianus
attttttcgaaacgcagttccgctg

SEQ ID NO: 188221 - DNA, 25 bp, Saccharomyces pastorianus
agaaggtttccatcacgctgtcaga

SEQ ID NO: 188222 - DNA, 25 bp, Saccharomyces pastorianus
agccaaagccattctgttttcctag

SEQ ID NO: 188223 - DNA, 25 bp, Saccharomyces pastorianus
gaagagatcctactgcgcagccaaa

SEQ ID NO: 188224 - DNA, 25 bp, Saccharomyces pastorianus
agttggcctccatgctactgaacgt

SEQ ID NO: 188225 - DNA, 25 bp, Saccharomyces pastorianus
aagccattgctgtccgcggtgtgtc

SEQ ID NO: 188226 - DNA, 25 bp, Saccharomyces pastorianus
gggcaggatcgtgtccatcaacaag

SEQ ID NO: 188227 - DNA, 25 bp, Saccharomyces pastorianus
ggagaagatcatcgcccacaaggac

SEQ ID NO: 188228 - DNA, 25 bp, Saccharomyces pastorianus
gacaagttcctcgtggtgagcgttt

SEQ ID NO: 188229 - DNA, 25 bp, Saccharomyces pastorianus
tgaacgtcaagtcgccacagcaaga

SEQ ID NO: 188230 - DNA, 25 bp, Saccharomyces pastorianus
tgctcaggcaagttttaaaaatcgc

SEQ ID NO: 188231 - DNA, 25 bp, Saccharomyces pastorianus
caggcaagttttaaaaatcgcgaag

SEQ ID NO: 188232 - DNA, 25 bp, Saccharomyces pastorianus
atgacatagaaaacccacggacttt

SEQ ID NO: 188233 - DNA, 25 bp, Saccharomyces pastorianus
cacggactttcaatgctcaggcaag

SEQ ID NO: 188234 - DNA, 25 bp, Saccharomyces pastorianus
gaaaacccacggactttcaatgctc

SEQ ID NO: 188235 - DNA, 25 bp, Saccharomyces pastorianus
gactttcaatgctcaggcaagtttt

SEQ ID NO: 188236 - DNA, 25 bp, Saccharomyces pastorianus
aaacccacggactttcaatgctcag

SEQ ID NO: 188237 - DNA, 25 bp, Saccharomyces pastorianus
gtctatgacatagaaaacccacgga

SEQ ID NO: 188238 - DNA, 25 bp, Saccharomyces pastorianus
aacccacggactttcaatgctcagg

SEQ ID NO: 188239 - DNA, 25 bp, Saccharomyces pastorianus
ccacggactttcaatgctcaggcaa

SEQ ID NO: 188240 - DNA, 25 bp, Saccharomyces pastorianus
cggactttcaatgctcaggcaagtt

SEQ ID NO: 188241 - DNA, 25 bp, Saccharomyces pastorianus
tagcatctactattaccctcggtga

SEQ ID NO: 188242 - DNA, 25 bp, Saccharomyces pastorianus
cactctgcggtctcgttatcagata

SEQ ID NO: 188243 - DNA, 25 bp, Saccharomyces pastorianus
agaagagcctctacattcgtccatt

SEQ ID NO: 188244 - DNA, 25 bp, Saccharomyces pastorianus
gcaggcagtctgcagcacgacccaa

SEQ ID NO: 188245 - DNA, 25 bp, Saccharomyces pastorianus
agcacgacccaagcgtactggcaag

SEQ ID NO: 188246 - DNA, 25 bp, Saccharomyces pastorianus
ttaccctcggtgaagacaccgtact

SEQ ID NO: 188247 - DNA, 25 bp, Saccharomyces pastorianus
aagcgtactggcaagcccattcggc

SEQ ID NO: 188248 - DNA, 25 bp, Saccharomyces pastorianus
gttaaacaccatggccaatgacgac

SEQ ID NO: 188249 - DNA, 25 bp, Saccharomyces pastorianus
ccactccgaggcaccatgataaggt

SEQ ID NO: 188250 - DNA, 25 bp, Saccharomyces pastorianus
ggaccccagcaagatgttaaacacc

SEQ ID NO: 188251 - DNA, 25 bp, Saccharomyces pastorianus
tggtggaccagagactggaccccag

SEQ ID NO: 188252 - DNA, 25 bp, Saccharomyces pastorianus
aaggagttctccttaaggacatacg

SEQ ID NO: 188253 - DNA, 25 bp, Saccharomyces pastorianus
gccattgctgttagagatcatagta

SEQ ID NO: 188254 - DNA, 25 bp, Saccharomyces pastorianus
tttgggatgccattgctgttagaga

SEQ ID NO: 188255 - DNA, 25 bp, Saccharomyces pastorianus
ggacatacgaatccacaaaagggta

SEQ ID NO: 188256 - DNA, 25 bp, Saccharomyces pastorianus
gaggtaatttttgggatgccattgc

SEQ ID NO: 188257 - DNA, 25 bp, Saccharomyces pastorianus
ggagttctccttaaggacatacgaa

SEQ ID NO: 188258 - DNA, 25 bp, Saccharomyces pastorianus
ggtgcacaaaatgaacaaggagttc

SEQ ID NO: 188259 - DNA, 25 bp, Saccharomyces pastorianus
aatttttgggatgccattgctgtta

SEQ ID NO: 188260 - DNA, 25 bp, Saccharomyces pastorianus
ttctccttaaggacatacgaatcca

SEQ ID NO: 188261 - DNA, 25 bp, Saccharomyces pastorianus
ggatgccattgctgttagagatcat

SEQ ID NO: 188262 - DNA, 25 bp, Saccharomyces pastorianus
gagatcatagtattaggtgcacaaa

SEQ ID NO: 188263 - DNA, 25 bp, Saccharomyces pastorianus
ggcccgatttccacgaactgataaa

SEQ ID NO: 188264 - DNA, 25 bp, Saccharomyces pastorianus
tggtcgacgacgtaagaaacaccgt

SEQ ID NO: 188265 - DNA, 25 bp, Saccharomyces pastorianus
aaacagtcatcgaccaccctggaag

SEQ ID NO: 188266 - DNA, 25 bp, Saccharomyces pastorianus
acatcaggcacacaaggcccgattt

SEQ ID NO: 188267 - DNA, 25 bp, Saccharomyces pastorianus
gacaagttttgtacacatcaggcac

SEQ ID NO: 188268 - DNA, 25 bp, Saccharomyces pastorianus
gcccgccttggtcgacgacgtaaga

SEQ ID NO: 188269 - DNA, 25 bp, Saccharomyces pastorianus
agtcatcgaccaccctggaaggatt

SEQ ID NO: 188270 - DNA, 25 bp, Saccharomyces pastorianus
atgaagaatgggagtccagcggact

SEQ ID NO: 188271 - DNA, 25 bp, Saccharomyces pastorianus
tccacgaactgataaacgagtcaat

SEQ ID NO: 188272 - DNA, 25 bp, Saccharomyces pastorianus
agcggactccgtagcaatcgtatgc

SEQ ID NO: 188273 - DNA, 25 bp, Saccharomyces pastorianus
gtagcaatcgtatgctgcggcccgc

SEQ ID NO: 188274 - DNA, 25 bp, Saccharomyces pastorianus
accacactttctcctaagtctgtat

SEQ ID NO: 188275 - DNA, 25 bp, Saccharomyces pastorianus
atgggatcgtctagttttgctcttt

SEQ ID NO: 188276 - DNA, 25 bp, Saccharomyces pastorianus
ctttctcctaagtctgtatcaccaa

SEQ ID NO: 188277 - DNA, 25 bp, Saccharomyces pastorianus
gttttgctctttcgtataagtcagg

SEQ ID NO: 188278 - DNA, 25 bp, Saccharomyces pastorianus
cgtctagttttgctctttcgtataa

SEQ ID NO: 188279 - DNA, 25 bp, Saccharomyces pastorianus
aagtctgtatcaccaatatccgtcg

SEQ ID NO: 188280 - DNA, 25 bp, Saccharomyces pastorianus
aagagtggtgttacgtcaacagcaa

SEQ ID NO: 188281 - DNA, 25 bp, Saccharomyces pastorianus
agcaaatttagacttaccgtccatt

SEQ ID NO: 188282 - DNA, 25 bp, Saccharomyces pastorianus
ataagtcaggaagtagcaccaccac

SEQ ID NO: 188283 - DNA, 25 bp, Saccharomyces pastorianus
gtatcaccaatatccgtcgtcgaaa

SEQ ID NO: 188284 - DNA, 25 bp, Saccharomyces pastorianus
aggaagtagcaccaccacactttct

SEQ ID NO: 188285 - DNA, 25 bp, Saccharomyces pastorianus
actccacacatcaagccttacggta

SEQ ID NO: 188286 - DNA, 25 bp, Saccharomyces pastorianus
agccttacggtaatctttctcttga

SEQ ID NO: 188287 - DNA, 25 bp, Saccharomyces pastorianus
tccatcagaacactcgctactggtg

SEQ ID NO: 188288 - DNA, 25 bp, Saccharomyces pastorianus
agtgttcggccagacattcaccgat

SEQ ID NO: 188289 - DNA, 25 bp, Saccharomyces pastorianus
gaagaattagtgttcggccagacat

SEQ ID NO: 188290 - DNA, 25 bp, Saccharomyces pastorianus
acccatctgcttgtgtattccatta

SEQ ID NO: 188291 - DNA, 25 bp, Saccharomyces pastorianus
gtaatctttctcttgacccatctgc

SEQ ID NO: 188292 - DNA, 25 bp, Saccharomyces pastorianus
attcaccgatcatatgttgaccatt

SEQ ID NO: 188293 - DNA, 25 bp, Saccharomyces pastorianus
gttgcagagacattccttgaagttg

SEQ ID NO: 188294 - DNA, 25 bp, Saccharomyces pastorianus
gttgaccattccttggtcagccaaa

SEQ ID NO: 188295 - DNA, 25 bp, Saccharomyces pastorianus
tggtgccccattagatgcatccaaa

SEQ ID NO: 188296 - DNA, 25 bp, Saccharomyces pastorianus
aagacaccgagactcgcgctatgat

SEQ ID NO: 188297 - DNA, 25 bp, Saccharomyces pastorianus
accaccatcttgttcgatctgaacg

SEQ ID NO: 188298 - DNA, 25 bp, Saccharomyces pastorianus
ttgactgtcactgcccaatggattg

SEQ ID NO: 188299 - DNA, 25 bp, Saccharomyces pastorianus
attgcacaagtttatccaaccccaa

SEQ ID NO: 188300 - DNA, 25 bp, Saccharomyces pastorianus
atctttgggccatctacttatccat

SEQ ID NO: 188301 - DNA, 25 bp, Saccharomyces pastorianus
gtcgcgtccaagattgttttcacta

SEQ ID NO: 188302 - DNA, 25 bp, Saccharomyces pastorianus
tttccaccgctctttgtgaaaacta

SEQ ID NO: 188303 - DNA, 25 bp, Saccharomyces pastorianus
atacatccctaggtatctgggcgga

SEQ ID NO: 188304 - DNA, 25 bp, Saccharomyces pastorianus
tgaacaccagccattgaacgatcca

SEQ ID NO: 188305 - DNA, 25 bp, Saccharomyces pastorianus
atggctctttggacgtccatctgaa

SEQ ID NO: 188306 - DNA, 25 bp, Saccharomyces pastorianus
ttgttttgaggctcactacccggaa

SEQ ID NO: 188307 - DNA, 25 bp, Saccharomyces pastorianus
acacattaggcgaatgcttcacaag

SEQ ID NO: 188308 - DNA, 25 bp, Saccharomyces pastorianus
gatctgtgacaatttcctcattagg

SEQ ID NO: 188309 - DNA, 25 bp, Saccharomyces pastorianus
tgaaaaggaatcctctacttccagt

SEQ ID NO: 188310 - DNA, 25 bp, Saccharomyces pastorianus
gaactacctgagttgacaaaaacta

SEQ ID NO: 188311 - DNA, 25 bp, Saccharomyces pastorianus
attaggcgaatgcttcacaagtgga

SEQ ID NO: 188312 - DNA, 25 bp, Saccharomyces pastorianus
gtcgtaatgacacctattatcactg

SEQ ID NO: 188313 - DNA, 25 bp, Saccharomyces pastorianus
gagctctttcggtgtcgtaatgaca

SEQ ID NO: 188314 - DNA, 25 bp, Saccharomyces pastorianus
agagctccgatgatgaactacctga

SEQ ID NO: 188315 - DNA, 25 bp, Saccharomyces pastorianus
aagtgtttgaaattgttcatcagaa

SEQ ID NO: 188316 - DNA, 25 bp, Saccharomyces pastorianus
tcctcattaggaagagacaatactc

SEQ ID NO: 188317 - DNA, 25 bp, Saccharomyces pastorianus
atacaaacctgagagctccgatgat

SEQ ID NO: 188318 - DNA, 25 bp, Saccharomyces pastorianus
atgcttctgtctatccggtggtgga

SEQ ID NO: 188319 - DNA, 25 bp, Saccharomyces pastorianus
taaaagctggtgttcgtagtgcgaa

SEQ ID NO: 188320 - DNA, 25 bp, Saccharomyces pastorianus
gtagtcttgagtcgcactggtccag

SEQ ID NO: 188321 - DNA, 25 bp, Saccharomyces pastorianus
attgcactctaggatattgcctaaa

SEQ ID NO: 188322 - DNA, 25 bp, Saccharomyces pastorianus
actacacgattccatattgcactct

SEQ ID NO: 188323 - DNA, 25 bp, Saccharomyces pastorianus
actggtccagtcttcgatttgtgtt

SEQ ID NO: 188324 - DNA, 25 bp, Saccharomyces pastorianus
gcaaattatgcttctgtctatccgg

SEQ ID NO: 188325 - DNA, 25 bp, Saccharomyces pastorianus
agtcataacttctattacgggtgga

SEQ ID NO: 188326 - DNA, 25 bp, Saccharomyces pastorianus
tagtgcgaatgaagacggtacgttt

SEQ ID NO: 188327 - DNA, 25 bp, Saccharomyces pastorianus
gatgagcgtgcgtccgatttaagaa

SEQ ID NO: 188328 - DNA, 25 bp, Saccharomyces pastorianus
ttttccgtcttgtatcccgatgaat

SEQ ID NO: 188329 - DNA, 25 bp, Saccharomyces pastorianus
tatcatgatatccaaggctgccaga

SEQ ID NO: 188330 - DNA, 25 bp, Saccharomyces pastorianus
gaaacagcgacaaagccaatgctat

SEQ ID NO: 188331 - DNA, 25 bp, Saccharomyces pastorianus
gatcagcgacccgatttcaaaaatg

SEQ ID NO: 188332 - DNA, 25 bp, Saccharomyces pastorianus
ataggtgtggcaattcttccccata

SEQ ID NO: 188333 - DNA, 25 bp, Saccharomyces pastorianus
caatagcaaatagcatggtctcctt

SEQ ID NO: 188334 - DNA, 25 bp, Saccharomyces pastorianus
taaagcagagatcagcgacccgatt

SEQ ID NO: 188335 - DNA, 25 bp, Saccharomyces pastorianus
agcatggtctccttgaatccgatag

SEQ ID NO: 188336 - DNA, 25 bp, Saccharomyces pastorianus
gagcgtttggtaagctatacccggt

SEQ ID NO: 188337 - DNA, 25 bp, Saccharomyces pastorianus
gtttagctacttcttcaatgattgt

SEQ ID NO: 188338 - DNA, 25 bp, Saccharomyces pastorianus
agagtacgatccaaactgtttagct

SEQ ID NO: 188339 - DNA, 25 bp, Saccharomyces pastorianus
aaataaccacccgatctcagagtac

SEQ ID NO: 188340 - DNA, 25 bp, Saccharomyces pastorianus
gtcaatatcacagaaaaatcacctc

SEQ ID NO: 188341 - DNA, 25 bp, Saccharomyces pastorianus
aatatcacagaaaaatcacctccaa

SEQ ID NO: 188342 - DNA, 25 bp, Saccharomyces pastorianus
caatatcacagaaaaatcacctcca

SEQ ID NO: 188343 - DNA, 25 bp, Saccharomyces pastorianus
cagaaaaatcacctccaaaatcacc

SEQ ID NO: 188344 - DNA, 25 bp, Saccharomyces pastorianus
tgctcttaatatatgcgttatacca

SEQ ID NO: 188345 - DNA, 25 bp, Saccharomyces pastorianus
tatcacagaaaaatcacctccaaaa

SEQ ID NO: 188346 - DNA, 25 bp, Saccharomyces pastorianus
cacagaaaaatcacctccaaaatca

SEQ ID NO: 188347 - DNA, 25 bp, Saccharomyces pastorianus
atatcacagaaaaatcacctccaaa

SEQ ID NO: 188348 - DNA, 25 bp, Saccharomyces pastorianus
tcaatatcacagaaaaatcacctcc

SEQ ID NO: 188349 - DNA, 25 bp, Saccharomyces pastorianus
atcacagaaaaatcacctccaaaat

SEQ ID NO: 188350 - DNA, 25 bp, Saccharomyces pastorianus
tcacagaaaaatcacctccaaaatc

SEQ ID NO: 188351 - DNA, 25 bp, Saccharomyces pastorianus
ttcatcgcaatgacaaaccccgtga

SEQ ID NO: 188352 - DNA, 25 bp, Saccharomyces pastorianus
gatgtggatagctcggcaagcgcca

SEQ ID NO: 188353 - DNA, 25 bp, Saccharomyces pastorianus
ttgtacgcgccaaccacagatgaaa

SEQ ID NO: 188354 - DNA, 25 bp, Saccharomyces pastorianus
ttaccgaagcgcgaggaccgacaac

SEQ ID NO: 188355 - DNA, 25 bp, Saccharomyces pastorianus
aaaccccgtgaatccttcagtggat

SEQ ID NO: 188356 - DNA, 25 bp, Saccharomyces pastorianus
aaccgattcctttctgcatacagtt

SEQ ID NO: 188357 - DNA, 25 bp, Saccharomyces pastorianus
aagattcgggactcgagcgattcga

SEQ ID NO: 188358 - DNA, 25 bp, Saccharomyces pastorianus
agacctcaaggccagttaccgaagc

SEQ ID NO: 188359 - DNA, 25 bp, Saccharomyces pastorianus
agcccctgtcctagttgaaaacgag

SEQ ID NO: 188360 - DNA, 25 bp, Saccharomyces pastorianus
gtggattttctcaaggttcattcga

SEQ ID NO: 188361 - DNA, 25 bp, Saccharomyces pastorianus
tgaactcaatgctgctcaaggcgac

SEQ ID NO: 188362 - DNA, 25 bp, Saccharomyces pastorianus
ctgagctactgaagctatctgttat

SEQ ID NO: 188363 - DNA, 25 bp, Saccharomyces pastorianus
tgagctactgaagctatctgttatt

SEQ ID NO: 188364 - DNA, 25 bp, Saccharomyces pastorianus
gagctactgaagctatctgttattg

SEQ ID NO: 188365 - DNA, 25 bp, Saccharomyces pastorianus
gctactgaagctatctgttattgaa

SEQ ID NO: 188366 - DNA, 25 bp, Saccharomyces pastorianus
ctactgaagctatctgttattgaag

SEQ ID NO: 188367 - DNA, 25 bp, Saccharomyces pastorianus
agctactgaagctatctgttattga

SEQ ID NO: 188368 - DNA, 25 bp, Saccharomyces pastorianus
tactgaagctatctgttattgaaga

SEQ ID NO: 188369 - DNA, 25 bp, Saccharomyces pastorianus
actgaagctatctgttattgaagat

SEQ ID NO: 188370 - DNA, 25 bp, Saccharomyces pastorianus
tcagcttccattagggttgataact

SEQ ID NO: 188371 - DNA, 25 bp, Saccharomyces pastorianus
tttcattatgctattacattatcaa

SEQ ID NO: 188372 - DNA, 25 bp, Saccharomyces pastorianus
tgctattacattatcaatcttgcat

SEQ ID NO: 188373 - DNA, 25 bp, Saccharomyces pastorianus
tatatgtttcattatgctattacat

SEQ ID NO: 188374 - DNA, 25 bp, Saccharomyces pastorianus
ttcattatgctattacattatcaat

SEQ ID NO: 188375 - DNA, 25 bp, Saccharomyces pastorianus
ttcagcttccattagggttgataac

SEQ ID NO: 188376 - DNA, 25 bp, Saccharomyces pastorianus
gttttatatgtttcattatgctatt

SEQ ID NO: 188377 - DNA, 25 bp, Saccharomyces pastorianus
cgttttatatgtttcattatgctat

SEQ ID NO: 188378 - DNA, 25 bp, Saccharomyces pastorianus
gtttcattatgctattacattatca

SEQ ID NO: 188379 - DNA, 25 bp, Saccharomyces pastorianus
ttatatgtttcattatgctattaca

SEQ ID NO: 188380 - DNA, 25 bp, Saccharomyces pastorianus
tttatatgtttcattatgctattac

SEQ ID NO: 188381 - DNA, 25 bp, Saccharomyces pastorianus
gagaacgttacgaaggccatcacca

SEQ ID NO: 188382 - DNA, 25 bp, Saccharomyces pastorianus
ttcattttctgtcttcgcccaaaga

SEQ ID NO: 188383 - DNA, 25 bp, Saccharomyces pastorianus
aagcagtgcctctagcggcttggat

SEQ ID NO: 188384 - DNA, 25 bp, Saccharomyces pastorianus
ggagagatggccacttttatcccgg

SEQ ID NO: 188385 - DNA, 25 bp, Saccharomyces pastorianus
ttggatcgtgatcttttggtgcctg

SEQ ID NO: 188386 - DNA, 25 bp, Saccharomyces pastorianus
ccctgttggtgccttgatatcgtat

SEQ ID NO: 188387 - DNA, 25 bp, Saccharomyces pastorianus
gtgtttcaccttcgcactggaacta

SEQ ID NO: 188388 - DNA, 25 bp, Saccharomyces pastorianus
attgggacgggcctcataattggta

SEQ ID NO: 188389 - DNA, 25 bp, Saccharomyces pastorianus
aattggtattggtccgccattggca

SEQ ID NO: 188390 - DNA, 25 bp, Saccharomyces pastorianus
ttatcccggttacatcttcattttc

SEQ ID NO: 188391 - DNA, 25 bp, Saccharomyces pastorianus
atttactccgttacacaatcgttag

SEQ ID NO: 188392 - DNA, 25 bp, Saccharomyces pastorianus
taggccactagagctttgtccaata

SEQ ID NO: 188393 - DNA, 25 bp, Saccharomyces pastorianus
tttcatggcatgactaggccactag

SEQ ID NO: 188394 - DNA, 25 bp, Saccharomyces pastorianus
actaggccactagagctttgtccaa

SEQ ID NO: 188395 - DNA, 25 bp, Saccharomyces pastorianus
agagctttgtccaataatcgaagaa

SEQ ID NO: 188396 - DNA, 25 bp, Saccharomyces pastorianus
agctgtttaataggttttcatggca

SEQ ID NO: 188397 - DNA, 25 bp, Saccharomyces pastorianus
gcatgactaggccactagagctttg

SEQ ID NO: 188398 - DNA, 25 bp, Saccharomyces pastorianus
gtttaataggttttcatggcatgac

SEQ ID NO: 188399 - DNA, 25 bp, Saccharomyces pastorianus
atggcatgactaggccactagagct

SEQ ID NO: 188400 - DNA, 25 bp, Saccharomyces pastorianus
ggccactagagctttgtccaataat

SEQ ID NO: 188401 - DNA, 25 bp, Saccharomyces pastorianus
actagagctttgtccaataatcgaa

SEQ ID NO: 188402 - DNA, 25 bp, Saccharomyces pastorianus
ggttttcatggcatgactaggccac

SEQ ID NO: 188403 - DNA, 25 bp, Saccharomyces pastorianus
ggcggagccaaaagcattgatgatt

SEQ ID NO: 188404 - DNA, 25 bp, Saccharomyces pastorianus
gaatggaccaagaattacgacgact

SEQ ID NO: 188405 - DNA, 25 bp, Saccharomyces pastorianus
tcgatttgacgtttggtagttcctt

SEQ ID NO: 188406 - DNA, 25 bp, Saccharomyces pastorianus
ggcgttggattgtcgcgatgaacaa

SEQ ID NO: 188407 - DNA, 25 bp, Saccharomyces pastorianus
taagccacggtaaagtcgatttgac

SEQ ID NO: 188408 - DNA, 25 bp, Saccharomyces pastorianus
cacgccgccgatgttgaaggtttgt

SEQ ID NO: 188409 - DNA, 25 bp, Saccharomyces pastorianus
aatgagtttctgattcacgccgccg

SEQ ID NO: 188410 - DNA, 25 bp, Saccharomyces pastorianus
aaaattgtttatgccggcggagcca

SEQ ID NO: 188411 - DNA, 25 bp, Saccharomyces pastorianus
actgacctcgagcttaacgcggaaa

SEQ ID NO: 188412 - DNA, 25 bp, Saccharomyces pastorianus
gcaaagaccgtattgttgtagattt

SEQ ID NO: 188413 - DNA, 25 bp, Saccharomyces pastorianus
aagtggcagaccttgactgacctcg

SEQ ID NO: 188414 - DNA, 25 bp, Saccharomyces pastorianus
gtgccaatccaggtgaatggagtat

SEQ ID NO: 188415 - DNA, 25 bp, Saccharomyces pastorianus
tcgtgtagtaggtgccaatccaggt

SEQ ID NO: 188416 - DNA, 25 bp, Saccharomyces pastorianus
cggtcgtgtagtaggtgccaatcca

SEQ ID NO: 188417 - DNA, 25 bp, Saccharomyces pastorianus
acgtgtgtgctggatggtgtatttt

SEQ ID NO: 188418 - DNA, 25 bp, Saccharomyces pastorianus
gagtattgatgtcgacaataggaca

SEQ ID NO: 188419 - DNA, 25 bp, Saccharomyces pastorianus
gtagtaggtgccaatccaggtgaat

SEQ ID NO: 188420 - DNA, 25 bp, Saccharomyces pastorianus
aaaatatatcacagacttttggaac

SEQ ID NO: 188421 - DNA, 25 bp, Saccharomyces pastorianus
gtgtgctggatggtgtattttgaaa

SEQ ID NO: 188422 - DNA, 25 bp, Saccharomyces pastorianus
tggtggttgctattcgtgggacgtg

SEQ ID NO: 188423 - DNA, 25 bp, Saccharomyces pastorianus
ggaacaattaataacgaaagtgacg

SEQ ID NO: 188424 - DNA, 25 bp, Saccharomyces pastorianus
ggtgaatggagtattgatgtcgaca

SEQ ID NO: 188425 - DNA, 25 bp, Saccharomyces pastorianus
gtacaagtacaacaacaacaagtac

SEQ ID NO: 188426 - DNA, 25 bp, Saccharomyces pastorianus
caacaacaacaagtacaagtacaac

SEQ ID NO: 188427 - DNA, 25 bp, Saccharomyces pastorianus
agtacaagtacaacaacaacaagta

SEQ ID NO: 188428 - DNA, 25 bp, Saccharomyces pastorianus
aacaagtacaacaacaacaagtaca

SEQ ID NO: 188429 - DNA, 25 bp, Saccharomyces pastorianus
agtacaacaacaacaagtacaacaa

SEQ ID NO: 188430 - DNA, 25 bp, Saccharomyces pastorianus
acaacaacaacaagtacaagtacaa

SEQ ID NO: 188431 - DNA, 25 bp, Saccharomyces pastorianus
acaagtacaacaacaacaagtacaa

SEQ ID NO: 188432 - DNA, 25 bp, Saccharomyces pastorianus
acaagtacaacaacaacaagcacaa

SEQ ID NO: 188433 - DNA, 25 bp, Saccharomyces pastorianus
aagtacaagtacaacaacaacaagt

SEQ ID NO: 188434 - DNA, 25 bp, Saccharomyces pastorianus
aacaagcacaacaacaacaagcaca

SEQ ID NO: 188435 - DNA, 25 bp, Saccharomyces pastorianus
tacaagtacaacaacaacaagtaca

SEQ ID NO: 188436 - DNA, 25 bp, Saccharomyces pastorianus
gggattccattgtttcttaatgtta

SEQ ID NO: 188437 - DNA, 25 bp, Saccharomyces pastorianus
tatgatgatctttgggattccattg

SEQ ID NO: 188438 - DNA, 25 bp, Saccharomyces pastorianus
tattatactagagattctcctcatg

SEQ ID NO: 188439 - DNA, 25 bp, Saccharomyces pastorianus
catttaaattgtatgatgatctttg

SEQ ID NO: 188440 - DNA, 25 bp, Saccharomyces pastorianus
atatattatactagagattctcctc

SEQ ID NO: 188441 - DNA, 25 bp, Saccharomyces pastorianus
atatatattatactagagattctcc

SEQ ID NO: 188442 - DNA, 25 bp, Saccharomyces pastorianus
atattatactagagattctcctcat

SEQ ID NO: 188443 - DNA, 25 bp, Saccharomyces pastorianus
atgatgatctttgggattccattgt

SEQ ID NO: 188444 - DNA, 25 bp, Saccharomyces pastorianus
tatattatactagagattctcctca

SEQ ID NO: 188445 - DNA, 25 bp, Saccharomyces pastorianus
taaattgtatgatgatctttgggat

SEQ ID NO: 188446 - DNA, 25 bp, Saccharomyces pastorianus
tatatattatactagagattctcct

SEQ ID NO: 188447 - DNA, 25 bp, Saccharomyces pastorianus
accggtgtcccatggtactccagca

SEQ ID NO: 188448 - DNA, 25 bp, Saccharomyces pastorianus
atcaccggtgtcccatggtactcca

SEQ ID NO: 188449 - DNA, 25 bp, Saccharomyces pastorianus
cagattaaagccagccatctctagt

SEQ ID NO: 188450 - DNA, 25 bp, Saccharomyces pastorianus
aaagccagccatctctagtgctcta

SEQ ID NO: 188451 - DNA, 25 bp, Saccharomyces pastorianus
tgatcaccggtgtcccatggtactc

SEQ ID NO: 188452 - DNA, 25 bp, Saccharomyces pastorianus
tcccatggtactccagcagattaaa

SEQ ID NO: 188453 - DNA, 25 bp, Saccharomyces pastorianus
gatcaccggtgtcccatggtactcc

SEQ ID NO: 188454 - DNA, 25 bp, Saccharomyces pastorianus
tcaccggtgtcccatggtactccag

SEQ ID NO: 188455 - DNA, 25 bp, Saccharomyces pastorianus
cccatggtactccagcagattaaag

SEQ ID NO: 188456 - DNA, 25 bp, Saccharomyces pastorianus
atgatcaccggtgtcccatggtact

SEQ ID NO: 188457 - DNA, 25 bp, Saccharomyces pastorianus
caccggtgtcccatggtactccagc

SEQ ID NO: 188458 - DNA, 25 bp, Saccharomyces pastorianus
ttgattgcgttctcgttgtgtctaa

SEQ ID NO: 188459 - DNA, 25 bp, Saccharomyces pastorianus
tgttctgtgcccctttgattgcgtt

SEQ ID NO: 188460 - DNA, 25 bp, Saccharomyces pastorianus
gacaccaaggacaatgacccaattc

SEQ ID NO: 188461 - DNA, 25 bp, Saccharomyces pastorianus
tattgttgcgttggtgttctgtgcc

SEQ ID NO: 188462 - DNA, 25 bp, Saccharomyces pastorianus
atacagtcgctgtcgaaaacatcga

SEQ ID NO: 188463 - DNA, 25 bp, Saccharomyces pastorianus
gattggaaactattgttgcgttggt

SEQ ID NO: 188464 - DNA, 25 bp, Saccharomyces pastorianus
gttctcgttgtgtctaagagatcct

SEQ ID NO: 188465 - DNA, 25 bp, Saccharomyces pastorianus
aaattaaccgatacagtcgctgtcg

SEQ ID NO: 188466 - DNA, 25 bp, Saccharomyces pastorianus
gtgaatacgtcgacaccaaggacaa

SEQ ID NO: 188467 - DNA, 25 bp, Saccharomyces pastorianus
atgacccaattcttgactggtttaa

SEQ ID NO: 188468 - DNA, 25 bp, Saccharomyces pastorianus
gtctaagagatcctaaattaaccga

SEQ ID NO: 188469 - DNA, 25 bp, Saccharomyces pastorianus
gtgtactagtcacatacccgaggtt

SEQ ID NO: 188470 - DNA, 25 bp, Saccharomyces pastorianus
gatacttgtccgatactgtggcttc

SEQ ID NO: 188471 - DNA, 25 bp, Saccharomyces pastorianus
atttatcctgataatcctcgcgtta

SEQ ID NO: 188472 - DNA, 25 bp, Saccharomyces pastorianus
ttaatcagtcaaaccgaagcgccct

SEQ ID NO: 188473 - DNA, 25 bp, Saccharomyces pastorianus
aatatgggcgcagctatggaatact

SEQ ID NO: 188474 - DNA, 25 bp, Saccharomyces pastorianus
atgtacacggcattgtgcagccgat

SEQ ID NO: 188475 - DNA, 25 bp, Saccharomyces pastorianus
attacaactgttttccccaatatgg

SEQ ID NO: 188476 - DNA, 25 bp, Saccharomyces pastorianus
aatcatttggccagttgcttgaccg

SEQ ID NO: 188477 - DNA, 25 bp, Saccharomyces pastorianus
tgcttgaccggttcaatcacgaggt

SEQ ID NO: 188478 - DNA, 25 bp, Saccharomyces pastorianus
gaagcgcccttttgcacggagttga

SEQ ID NO: 188479 - DNA, 25 bp, Saccharomyces pastorianus
atttatcgattcagcattgccttct

SEQ ID NO: 188480 - DNA, 25 bp, Saccharomyces pastorianus
tcaaaggcactatcctttttccctt

SEQ ID NO: 188481 - DNA, 25 bp, Saccharomyces pastorianus
gggctgaattggtggtgaactctaa

SEQ ID NO: 188482 - DNA, 25 bp, Saccharomyces pastorianus
cagaatctcctaactgggctgaatt

SEQ ID NO: 188483 - DNA, 25 bp, Saccharomyces pastorianus
tcagtagcgttcatctcattaatca

SEQ ID NO: 188484 - DNA, 25 bp, Saccharomyces pastorianus
tctcgttatcttcgtcagaatctcc

SEQ ID NO: 188485 - DNA, 25 bp, Saccharomyces pastorianus
tcagtattgaaaacctcctgttggt

SEQ ID NO: 188486 - DNA, 25 bp, Saccharomyces pastorianus
aaagtcatgcttttttcctcgctgt

SEQ ID NO: 188487 - DNA, 25 bp, Saccharomyces pastorianus
gtgaactctaagtggtctagctcaa

SEQ ID NO: 188488 - DNA, 25 bp, Saccharomyces pastorianus
gtggtctagctcaaaggcactatcc

SEQ ID NO: 188489 - DNA, 25 bp, Saccharomyces pastorianus
tcatcagtagcgttcatctcattaa

SEQ ID NO: 188490 - DNA, 25 bp, Saccharomyces pastorianus
tttcctcgctgttagcttcatttgc

SEQ ID NO: 188491 - DNA, 25 bp, Saccharomyces pastorianus
atgaacgcgtgcatgcaactcgtcc

SEQ ID NO: 188492 - DNA, 25 bp, Saccharomyces pastorianus
catttggatggtatcagtggcgcct

SEQ ID NO: 188493 - DNA, 25 bp, Saccharomyces pastorianus
gtgcatgcaactcgtcctcagtgac

SEQ ID NO: 188494 - DNA, 25 bp, Saccharomyces pastorianus
tcaaaacagtgcacgtgcacccatg

SEQ ID NO: 188495 - DNA, 25 bp, Saccharomyces pastorianus
gcacgtgcacccatggcatttggat

SEQ ID NO: 188496 - DNA, 25 bp, Saccharomyces pastorianus
tcgtcctcagtgacttggtcgccag

SEQ ID NO: 188497 - DNA, 25 bp, Saccharomyces pastorianus
tttggatggtatcagtggcgccttt

SEQ ID NO: 188498 - DNA, 25 bp, Saccharomyces pastorianus
agtgcacgtgcacccatggcatttg

SEQ ID NO: 188499 - DNA, 25 bp, Saccharomyces pastorianus
cctcagtgacttggtcgccaggcgg

SEQ ID NO: 188500 - DNA, 25 bp, Saccharomyces pastorianus
atgcaactcgtcctcagtgacttgg

SEQ ID NO: 188501 - DNA, 25 bp, Saccharomyces pastorianus
aactcgtcctcagtgacttggtcgc

SEQ ID NO: 188502 - DNA, 25 bp, Saccharomyces pastorianus
cactgctgcaatactttctgtacct

SEQ ID NO: 188503 - DNA, 25 bp, Saccharomyces pastorianus
taccatgaatgcacgtgtcgctgtc

SEQ ID NO: 188504 - DNA, 25 bp, Saccharomyces pastorianus
tagtagcattagcactaccatgaat

SEQ ID NO: 188505 - DNA, 25 bp, Saccharomyces pastorianus
atcactgctgcaatactttctgtac

SEQ ID NO: 188506 - DNA, 25 bp, Saccharomyces pastorianus
gtagtagcattagcactaccatgaa

SEQ ID NO: 188507 - DNA, 25 bp, Saccharomyces pastorianus
actgctgcaatactttctgtacctg

SEQ ID NO: 188508 - DNA, 25 bp, Saccharomyces pastorianus
ctgcaatactttctgtacctgtcac

SEQ ID NO: 188509 - DNA, 25 bp, Saccharomyces pastorianus
tcatcactgctgcaatactttctgt

SEQ ID NO: 188510 - DNA, 25 bp, Saccharomyces pastorianus
catgaatgcacgtgtcgctgtcctc

SEQ ID NO: 188511 - DNA, 25 bp, Saccharomyces pastorianus
tagcactaccatgaatgcacgtgtc

SEQ ID NO: 188512 - DNA, 25 bp, Saccharomyces pastorianus
tcactgctgcaatactttctgtacc

SEQ ID NO: 188513 - DNA, 25 bp, Saccharomyces pastorianus
atgagcttttaaacgtggaacacgg

SEQ ID NO: 188514 - DNA, 25 bp, Saccharomyces pastorianus
ctgtttggaacagattttcaacgta

SEQ ID NO: 188515 - DNA, 25 bp, Saccharomyces pastorianus
aaaatgccattaccatcgggcgcta

SEQ ID NO: 188516 - DNA, 25 bp, Saccharomyces pastorianus
agatctgtcggaagagcttgcggct

SEQ ID NO: 188517 - DNA, 25 bp, Saccharomyces pastorianus
ccaactgccgcaagatctgtcggaa

SEQ ID NO: 188518 - DNA, 25 bp, Saccharomyces pastorianus
gagcttgcggctcaaataacctggc

SEQ ID NO: 188519 - DNA, 25 bp, Saccharomyces pastorianus
agtaccttgccatagaatcgttggt

SEQ ID NO: 188520 - DNA, 25 bp, Saccharomyces pastorianus
accatcgggcgctattccctttgag

SEQ ID NO: 188521 - DNA, 25 bp, Saccharomyces pastorianus
gaatagggaagccaactgccgcaag

SEQ ID NO: 188522 - DNA, 25 bp, Saccharomyces pastorianus
taaccggatataaatggagctgtaa

SEQ ID NO: 188523 - DNA, 25 bp, Saccharomyces pastorianus
taacctggcattgttagtaccttgc

SEQ ID NO: 188524 - DNA, 25 bp, Saccharomyces pastorianus
gtcaaccttctaaatataagcacga

SEQ ID NO: 188525 - DNA, 25 bp, Saccharomyces pastorianus
atttatcaatactgtcaaccttcta

SEQ ID NO: 188526 - DNA, 25 bp, Saccharomyces pastorianus
gagcatcaaacctttcatttatcaa

SEQ ID NO: 188527 - DNA, 25 bp, Saccharomyces pastorianus
aattgtgagcatcaaacctttcatt

SEQ ID NO: 188528 - DNA, 25 bp, Saccharomyces pastorianus
aatactgtcaaccttctaaatataa

SEQ ID NO: 188529 - DNA, 25 bp, Saccharomyces pastorianus
tgtgagcatcaaacctttcatttat

SEQ ID NO: 188530 - DNA, 25 bp, Saccharomyces pastorianus
caggtcgttagctcagaaaattgtg

SEQ ID NO: 188531 - DNA, 25 bp, Saccharomyces pastorianus
atggtcaggtcgttagctcagaaaa

SEQ ID NO: 188532 - DNA, 25 bp, Saccharomyces pastorianus
aaacctttcatttatcaatactgtc

SEQ ID NO: 188533 - DNA, 25 bp, Saccharomyces pastorianus
ggtcaggtcgttagctcagaaaatt

SEQ ID NO: 188534 - DNA, 25 bp, Saccharomyces pastorianus
tatcaatactgtcaaccttctaaat

SEQ ID NO: 188535 - DNA, 25 bp, Saccharomyces pastorianus
gatagatactccagaatgaaacaca

SEQ ID NO: 188536 - DNA, 25 bp, Saccharomyces pastorianus
gtcaaaacaccaaaaatgatttaca

SEQ ID NO: 188537 - DNA, 25 bp, Saccharomyces pastorianus
ccagaatgaaacacattgcctcaaa

SEQ ID NO: 188538 - DNA, 25 bp, Saccharomyces pastorianus
tggaagaattcttccgtcaaaacac

SEQ ID NO: 188539 - DNA, 25 bp, Saccharomyces pastorianus
aaggatggaagaattcttccgtcaa

SEQ ID NO: 188540 - DNA, 25 bp, Saccharomyces pastorianus
tactccagaatgaaacacattgcct

SEQ ID NO: 188541 - DNA, 25 bp, Saccharomyces pastorianus
tagatactccagaatgaaacacatt

SEQ ID NO: 188542 - DNA, 25 bp, Saccharomyces pastorianus
acatattttaaacgaggattcatta

SEQ ID NO: 188543 - DNA, 25 bp, Saccharomyces pastorianus
aaacgaggattcattaaatcagcaa

SEQ ID NO: 188544 - DNA, 25 bp, Saccharomyces pastorianus
cattaaatcagcaatattccccgtt

SEQ ID NO: 188545 - DNA, 25 bp, Saccharomyces pastorianus
taaatcagcaatattccccgttagg

SEQ ID NO: 188546 - DNA, 25 bp, Saccharomyces pastorianus
cccgctggtttcgctgccatcgctg

SEQ ID NO: 188547 - DNA, 25 bp, Saccharomyces pastorianus
ccccgctggtttcgctgccatcgct

SEQ ID NO: 188548 - DNA, 25 bp, Saccharomyces pastorianus
gtaacttcaatccccgctggtttcg

SEQ ID NO: 188549 - DNA, 25 bp, Saccharomyces pastorianus
cttcaatccccgctggtttcgctgc

SEQ ID NO: 188550 - DNA, 25 bp, Saccharomyces pastorianus
ttcaatccccgctggtttcgctgcc

SEQ ID NO: 188551 - DNA, 25 bp, Saccharomyces pastorianus
aatccccgctggtttcgctgccatc

SEQ ID NO: 188552 - DNA, 25 bp, Saccharomyces pastorianus
atccccgctggtttcgctgccatcg

SEQ ID NO: 188553 - DNA, 25 bp, Saccharomyces pastorianus
tcaatccccgctggtttcgctgcca

SEQ ID NO: 188554 - DNA, 25 bp, Saccharomyces pastorianus
caatccccgctggtttcgctgccat

SEQ ID NO: 188555 - DNA, 25 bp, Saccharomyces pastorianus
tccccgctggtttcgctgccatcgc

SEQ ID NO: 188556 - DNA, 25 bp, Saccharomyces pastorianus
aacttcaatccccgctggtttcgct

SEQ ID NO: 188557 - DNA, 25 bp, Saccharomyces pastorianus
ccatccaatcgatcaacgaggcagc

SEQ ID NO: 188558 - DNA, 25 bp, Saccharomyces pastorianus
tatttccatccaatcgatcaacgag

SEQ ID NO: 188559 - DNA, 25 bp, Saccharomyces pastorianus
atttccatccaatcgatcaacgagg

SEQ ID NO: 188560 - DNA, 25 bp, Saccharomyces pastorianus
catccaatcgatcaacgaggcagcc

SEQ ID NO: 188561 - DNA, 25 bp, Saccharomyces pastorianus
tccatccaatcgatcaacgaggcag

SEQ ID NO: 188562 - DNA, 25 bp, Saccharomyces pastorianus
atcgatcaacgaggcagccaacaaa

SEQ ID NO: 188563 - DNA, 25 bp, Saccharomyces pastorianus
aatcgatcaacgaggcagccaacaa

SEQ ID NO: 188564 - DNA, 25 bp, Saccharomyces pastorianus
tccaatcgatcaacgaggcagccaa

SEQ ID NO: 188565 - DNA, 25 bp, Saccharomyces pastorianus
tttccatccaatcgatcaacgaggc

SEQ ID NO: 188566 - DNA, 25 bp, Saccharomyces pastorianus
caatcgatcaacgaggcagccaaca

SEQ ID NO: 188567 - DNA, 25 bp, Saccharomyces pastorianus
ttccatccaatcgatcaacgaggca

SEQ ID NO: 188568 - DNA, 25 bp, Saccharomyces pastorianus
ttgctagactaagatcagacaggtt

SEQ ID NO: 188569 - DNA, 25 bp, Saccharomyces pastorianus
gtactggtactcgatgctatactat

SEQ ID NO: 188570 - DNA, 25 bp, Saccharomyces pastorianus
cagacaggttaatatccatacacaa

SEQ ID NO: 188571 - DNA, 25 bp, Saccharomyces pastorianus
gggccgctcattgctagactaagat

SEQ ID NO: 188572 - DNA, 25 bp, Saccharomyces pastorianus
gatgctatactatttcactcggtcc

SEQ ID NO: 188573 - DNA, 25 bp, Saccharomyces pastorianus
gacttgaaacagttgttgagcataa

SEQ ID NO: 188574 - DNA, 25 bp, Saccharomyces pastorianus
tatttcactcggtcctagctgaaga

SEQ ID NO: 188575 - DNA, 25 bp, Saccharomyces pastorianus
gttaatatccatacacaaacaagag

SEQ ID NO: 188576 - DNA, 25 bp, Saccharomyces pastorianus
tatactatttcactcggtcctagct

SEQ ID NO: 188577 - DNA, 25 bp, Saccharomyces pastorianus
aacaagagaataccctccaaactca

SEQ ID NO: 188578 - DNA, 25 bp, Saccharomyces pastorianus
gaataccctccaaactcaaaagtgt

SEQ ID NO: 188579 - DNA, 25 bp, Saccharomyces pastorianus
ccggtcacttcttctttactgataa

SEQ ID NO: 188580 - DNA, 25 bp, Saccharomyces pastorianus
gaaagcgtattaactcaatggtcaa

SEQ ID NO: 188581 - DNA, 25 bp, Saccharomyces pastorianus
aacgaagaaagctccggtcacttct

SEQ ID NO: 188582 - DNA, 25 bp, Saccharomyces pastorianus
tactgtttgttgacttaatttctag

SEQ ID NO: 188583 - DNA, 25 bp, Saccharomyces pastorianus
aactgtgtagggatattttcagaca

SEQ ID NO: 188584 - DNA, 25 bp, Saccharomyces pastorianus
atttcatcaccgctgttcatatcaa

SEQ ID NO: 188585 - DNA, 25 bp, Saccharomyces pastorianus
agactttgatgttgacttccctata

SEQ ID NO: 188586 - DNA, 25 bp, Saccharomyces pastorianus
gaaatccattaacttttcactccaa

SEQ ID NO: 188587 - DNA, 25 bp, Saccharomyces pastorianus
aacgtacacacgaagggctaactat

SEQ ID NO: 188588 - DNA, 25 bp, Saccharomyces pastorianus
cgctgttcatatcaatacttctaga

SEQ ID NO: 188589 - DNA, 25 bp, Saccharomyces pastorianus
cgaagggctaactatcacagatgaa

SEQ ID NO: 188590 - DNA, 25 bp, Saccharomyces pastorianus
accgggagtcattgatatttctaca

SEQ ID NO: 188591 - DNA, 25 bp, Saccharomyces pastorianus
gagtcattgatatttctacagcaga

SEQ ID NO: 188592 - DNA, 25 bp, Saccharomyces pastorianus
ggagtcattgatatttctacagcag

SEQ ID NO: 188593 - DNA, 25 bp, Saccharomyces pastorianus
aaaataaaccgggagtcattgatat

SEQ ID NO: 188594 - DNA, 25 bp, Saccharomyces pastorianus
aaccgggagtcattgatatttctac

SEQ ID NO: 188595 - DNA, 25 bp, Saccharomyces pastorianus
gggagtcattgatatttctacagca

SEQ ID NO: 188596 - DNA, 25 bp, Saccharomyces pastorianus
ccgggagtcattgatatttctacag

SEQ ID NO: 188597 - DNA, 25 bp, Saccharomyces pastorianus
gatatttctacagcagaggagcagg

SEQ ID NO: 188598 - DNA, 25 bp, Saccharomyces pastorianus
attgatatttctacagcagaggagc

SEQ ID NO: 188599 - DNA, 25 bp, Saccharomyces pastorianus
ataaaccgggagtcattgatatttc

SEQ ID NO: 188600 - DNA, 25 bp, Saccharomyces pastorianus
gtcattgatatttctacagcagagg

SEQ ID NO: 188601 - DNA, 25 bp, Saccharomyces pastorianus
aaaagacggcttcgagttatataga

SEQ ID NO: 188602 - DNA, 25 bp, Saccharomyces pastorianus
gacggcttcgagttatatagataca

SEQ ID NO: 188603 - DNA, 25 bp, Saccharomyces pastorianus
gagagttggctctcttatgaagtcc

SEQ ID NO: 188604 - DNA, 25 bp, Saccharomyces pastorianus
acggcttcgagttatatagatacac

SEQ ID NO: 188605 - DNA, 25 bp, Saccharomyces pastorianus
gttatatagatacactccggaatta

SEQ ID NO: 188606 - DNA, 25 bp, Saccharomyces pastorianus
tatatagatacactccggaattagg

SEQ ID NO: 188607 - DNA, 25 bp, Saccharomyces pastorianus
tatagatacactccggaattaggtg

SEQ ID NO: 188608 - DNA, 25 bp, Saccharomyces pastorianus
aagacggcttcgagttatatagata

SEQ ID NO: 188609 - DNA, 25 bp, Saccharomyces pastorianus
gtaaaaggagagttggctctcttat

SEQ ID NO: 188610 - DNA, 25 bp, Saccharomyces pastorianus
cggcttcgagttatatagatacact

SEQ ID NO: 188611 - DNA, 25 bp, Saccharomyces pastorianus
gcaaaagacggcttcgagttatata

SEQ ID NO: 188612 - DNA, 25 bp, Saccharomyces pastorianus
caggaagattggtactactctcata

SEQ ID NO: 188613 - DNA, 25 bp, Saccharomyces pastorianus
ggcaagaaacgttgacaccttgtct

SEQ ID NO: 188614 - DNA, 25 bp, Saccharomyces pastorianus
gatagacgaagcactgaacaggtta

SEQ ID NO: 188615 - DNA, 25 bp, Saccharomyces pastorianus
gatagttctggtgttagtatccaca

SEQ ID NO: 188616 - DNA, 25 bp, Saccharomyces pastorianus
aaagggacttgttttgatgcagata

SEQ ID NO: 188617 - DNA, 25 bp, Saccharomyces pastorianus
aattccctcaaagctcgtgatcaaa

SEQ ID NO: 188618 - DNA, 25 bp, Saccharomyces pastorianus
tcgcaagaggaagtcatcgcattat

SEQ ID NO: 188619 - DNA, 25 bp, Saccharomyces pastorianus
aaatcgttttcccaaatggcgctgt

SEQ ID NO: 188620 - DNA, 25 bp, Saccharomyces pastorianus
gcagatatggattttcgcgcatcat

SEQ ID NO: 188621 - DNA, 25 bp, Saccharomyces pastorianus
gacgttttcatggaccaggttaaca

SEQ ID NO: 188622 - DNA, 25 bp, Saccharomyces pastorianus
aagccgatgcggtcaaggattattg

SEQ ID NO: 188623 - DNA, 25 bp, Saccharomyces pastorianus
agacagcttgaaactctgctctcat

SEQ ID NO: 188624 - DNA, 25 bp, Saccharomyces pastorianus
agcgtcgttacttcgtctgaatacg

SEQ ID NO: 188625 - DNA, 25 bp, Saccharomyces pastorianus
gaaactctgctctcatttcaacatg

SEQ ID NO: 188626 - DNA, 25 bp, Saccharomyces pastorianus
aaggaatatgctggctaatacaaca

SEQ ID NO: 188627 - DNA, 25 bp, Saccharomyces pastorianus
acatacaaggataacggcgcactcg

SEQ ID NO: 188628 - DNA, 25 bp, Saccharomyces pastorianus
gttgcgtttgatgcttttagtactt

SEQ ID NO: 188629 - DNA, 25 bp, Saccharomyces pastorianus
ttaaagctcagcgtcgttacttcgt

SEQ ID NO: 188630 - DNA, 25 bp, Saccharomyces pastorianus
atttttggcctctattcgcctatat

SEQ ID NO: 188631 - DNA, 25 bp, Saccharomyces pastorianus
ttcagaatcagttcgtacatacaag

SEQ ID NO: 188632 - DNA, 25 bp, Saccharomyces pastorianus
ggcgcactcgaaaatcagctgctag

SEQ ID NO: 188633 - DNA, 25 bp, Saccharomyces pastorianus
cgcctatatcagtaatgtcaccaaa

SEQ ID NO: 188634 - DNA, 25 bp, Saccharomyces pastorianus
catttacccataaagtccatcatta

SEQ ID NO: 188635 - DNA, 25 bp, Saccharomyces pastorianus
tacgttataccacttttgcaccata

SEQ ID NO: 188636 - DNA, 25 bp, Saccharomyces pastorianus
tacagaaaaattaccactaaaatca

SEQ ID NO: 188637 - DNA, 25 bp, Saccharomyces pastorianus
tcaatattacagaaaaattaccact

SEQ ID NO: 188638 - DNA, 25 bp, Saccharomyces pastorianus
caatattacagaaaaattaccacta

SEQ ID NO: 188639 - DNA, 25 bp, Saccharomyces pastorianus
atacgttataccacttttgcaccat

SEQ ID NO: 188640 - DNA, 25 bp, Saccharomyces pastorianus
gtcaatattacagaaaaattaccac

SEQ ID NO: 188641 - DNA, 25 bp, Saccharomyces pastorianus
catacgttataccacttttgcacca

SEQ ID NO: 188642 - DNA, 25 bp, Saccharomyces pastorianus
cgttataccacttttgcaccatata

SEQ ID NO: 188643 - DNA, 25 bp, Saccharomyces pastorianus
ttcggcgacaccaaatattgtataa

SEQ ID NO: 188644 - DNA, 25 bp, Saccharomyces pastorianus
acgttataccacttttgcaccatat

SEQ ID NO: 188645 - DNA, 25 bp, Saccharomyces pastorianus
ttacgtgggcatagatcacgcttca

SEQ ID NO: 188646 - DNA, 25 bp, Saccharomyces pastorianus
acgtgggcatagatcacgcttcagc

SEQ ID NO: 188647 - DNA, 25 bp, Saccharomyces pastorianus
cgtgggcatagatcacgcttcagcc

SEQ ID NO: 188648 - DNA, 25 bp, Saccharomyces pastorianus
gtttacgtgggcatagatcacgctt

SEQ ID NO: 188649 - DNA, 25 bp, Saccharomyces pastorianus
cgcttcagccgctctgtgtcgactt

SEQ ID NO: 188650 - DNA, 25 bp, Saccharomyces pastorianus
tttacgtgggcatagatcacgcttc

SEQ ID NO: 188651 - DNA, 25 bp, Saccharomyces pastorianus
tacgtgggcatagatcacgcttcag

SEQ ID NO: 188652 - DNA, 25 bp, Saccharomyces pastorianus
cttcagccgctctgtgtcgactttc

SEQ ID NO: 188653 - DNA, 25 bp, Saccharomyces pastorianus
atgggtttacgtgggcatagatcac

SEQ ID NO: 188654 - DNA, 25 bp, Saccharomyces pastorianus
tgggtttacgtgggcatagatcacg

SEQ ID NO: 188655 - DNA, 25 bp, Saccharomyces pastorianus
gcttcagccgctctgtgtcgacttt

SEQ ID NO: 188656 - DNA, 25 bp, Saccharomyces pastorianus
gaatttgccttctttgtcaataatc

SEQ ID NO: 188657 - DNA, 25 bp, Saccharomyces pastorianus
tggcattcgacagcaacttcattga

SEQ ID NO: 188658 - DNA, 25 bp, Saccharomyces pastorianus
gcaatctatcgtgtgggaactatgt

SEQ ID NO: 188659 - DNA, 25 bp, Saccharomyces pastorianus
tcaagaaatcctgtactgctacgag

SEQ ID NO: 188660 - DNA, 25 bp, Saccharomyces pastorianus
gggagagccccaaaaatttgcaatt

SEQ ID NO: 188661 - DNA, 25 bp, Saccharomyces pastorianus
ggtacccgtacatcttggcattcga

SEQ ID NO: 188662 - DNA, 25 bp, Saccharomyces pastorianus
attattcattgggagggagagcccc

SEQ ID NO: 188663 - DNA, 25 bp, Saccharomyces pastorianus
tccttgctgataagattcgacttct

SEQ ID NO: 188664 - DNA, 25 bp, Saccharomyces pastorianus
aattaattcgttgcgtccttgctga

SEQ ID NO: 188665 - DNA, 25 bp, Saccharomyces pastorianus
gctttgttacacagaatttgccttc

SEQ ID NO: 188666 - DNA, 25 bp, Saccharomyces pastorianus
gtgggaactatgtttttgctttgtt

SEQ ID NO: 188667 - DNA, 25 bp, Saccharomyces pastorianus
gcttgtcgatcattggctagtgtga

SEQ ID NO: 188668 - DNA, 25 bp, Saccharomyces pastorianus
agccattttcaaccagagagctaaa

SEQ ID NO: 188669 - DNA, 25 bp, Saccharomyces pastorianus
tcacagttagagaaaatgggccaaa

SEQ ID NO: 188670 - DNA, 25 bp, Saccharomyces pastorianus
aaccttacaaagacgaaatggcaag

SEQ ID NO: 188671 - DNA, 25 bp, Saccharomyces pastorianus
ggaatttttaacttttgagaggcat

SEQ ID NO: 188672 - DNA, 25 bp, Saccharomyces pastorianus
gaatctcaaaaggagtgcattgaac

SEQ ID NO: 188673 - DNA, 25 bp, Saccharomyces pastorianus
acttttctattgacaagattcggga

SEQ ID NO: 188674 - DNA, 25 bp, Saccharomyces pastorianus
gctagaggcagccattgaatctcaa

SEQ ID NO: 188675 - DNA, 25 bp, Saccharomyces pastorianus
agattcgggagtttcggaacggcat

SEQ ID NO: 188676 - DNA, 25 bp, Saccharomyces pastorianus
gagaggcattataaccttacaaaga

SEQ ID NO: 188677 - DNA, 25 bp, Saccharomyces pastorianus
cggcatggaaatatcgctagaggca

SEQ ID NO: 188678 - DNA, 25 bp, Saccharomyces pastorianus
ggatctccaagaattcggttctaca

SEQ ID NO: 188679 - DNA, 25 bp, Saccharomyces pastorianus
gagccaccaatcgaaattttctcaa

SEQ ID NO: 188680 - DNA, 25 bp, Saccharomyces pastorianus
ggagtgtattcattcttaaagagcc

SEQ ID NO: 188681 - DNA, 25 bp, Saccharomyces pastorianus
tctaatgagcttgaaaaccgggtta

SEQ ID NO: 188682 - DNA, 25 bp, Saccharomyces pastorianus
ggttgttgataaagccggatctcca

SEQ ID NO: 188683 - DNA, 25 bp, Saccharomyces pastorianus
ggtgagcccgaaggaagccaaatac

SEQ ID NO: 188684 - DNA, 25 bp, Saccharomyces pastorianus
cctgtcctccctgaatacgaaaaat

SEQ ID NO: 188685 - DNA, 25 bp, Saccharomyces pastorianus
agtacattcaccaagcaaatccata

SEQ ID NO: 188686 - DNA, 25 bp, Saccharomyces pastorianus
gagttagcgggcttactcgtccctg

SEQ ID NO: 188687 - DNA, 25 bp, Saccharomyces pastorianus
gattcgaggataacatcacgttcaa

SEQ ID NO: 188688 - DNA, 25 bp, Saccharomyces pastorianus
taatggcgtatgaccccgagttagc

SEQ ID NO: 188689 - DNA, 25 bp, Saccharomyces pastorianus
gaagctctaaaacatcatgatgatt

SEQ ID NO: 188690 - DNA, 25 bp, Saccharomyces pastorianus
gatgattgtgtggattctgatgtaa

SEQ ID NO: 188691 - DNA, 25 bp, Saccharomyces pastorianus
gttggcacttgttggaatgaagctc

SEQ ID NO: 188692 - DNA, 25 bp, Saccharomyces pastorianus
gcacttgttggaatgaagctctaaa

SEQ ID NO: 188693 - DNA, 25 bp, Saccharomyces pastorianus
gattgtgtggattctgatgtaattg

SEQ ID NO: 188694 - DNA, 25 bp, Saccharomyces pastorianus
atgatgattgtgtggattctgatgt

SEQ ID NO: 188695 - DNA, 25 bp, Saccharomyces pastorianus
ctgtgttggcacttgttggaatgaa

SEQ ID NO: 188696 - DNA, 25 bp, Saccharomyces pastorianus
tgctgtgttggcacttgttggaatg

SEQ ID NO: 188697 - DNA, 25 bp, Saccharomyces pastorianus
ggaatgaagctctaaaacatcatga

SEQ ID NO: 188698 - DNA, 25 bp, Saccharomyces pastorianus
ggcacttgttggaatgaagctctaa

SEQ ID NO: 188699 - DNA, 25 bp, Saccharomyces pastorianus
acatcatgatgattgtgtggattct

SEQ ID NO: 188700 - DNA, 25 bp, Saccharomyces pastorianus
gatatggataagttccccagaccct

SEQ ID NO: 188701 - DNA, 25 bp, Saccharomyces pastorianus
gaagaggacatccagccgcagttaa

SEQ ID NO: 188702 - DNA, 25 bp, Saccharomyces pastorianus
agagacgattggacgtgtcgcttct

SEQ ID NO: 188703 - DNA, 25 bp, Saccharomyces pastorianus
aagaatgaggaccacagaccccacg

SEQ ID NO: 188704 - DNA, 25 bp, Saccharomyces pastorianus
gaccccacgactactctgatatgga

SEQ ID NO: 188705 - DNA, 25 bp, Saccharomyces pastorianus
gaagtacgggatcaaggcctcgtct

SEQ ID NO: 188706 - DNA, 25 bp, Saccharomyces pastorianus
gaatcgcattgcaggtccgtcggat

SEQ ID NO: 188707 - DNA, 25 bp, Saccharomyces pastorianus
ggacttcacctactccgagaagtac

SEQ ID NO: 188708 - DNA, 25 bp, Saccharomyces pastorianus
taagctgtcaactcccagggacgag

SEQ ID NO: 188709 - DNA, 25 bp, Saccharomyces pastorianus
gaccgggtcagtctaagctgtcaac

SEQ ID NO: 188710 - DNA, 25 bp, Saccharomyces pastorianus
aattcaggctggtaccgagttcggc

SEQ ID NO: 188711 - DNA, 25 bp, Saccharomyces pastorianus
gaccttttggatatttcgaagaacg

SEQ ID NO: 188712 - DNA, 25 bp, Saccharomyces pastorianus
aacagaccttttggatatttcgaag

SEQ ID NO: 188713 - DNA, 25 bp, Saccharomyces pastorianus
acagaccttttggatatttcgaaga

SEQ ID NO: 188714 - DNA, 25 bp, Saccharomyces pastorianus
agctctaacagaccttttggatatt

SEQ ID NO: 188715 - DNA, 25 bp, Saccharomyces pastorianus
cagaccttttggatatttcgaagaa

SEQ ID NO: 188716 - DNA, 25 bp, Saccharomyces pastorianus
aagctctaacagaccttttggatat

SEQ ID NO: 188717 - DNA, 25 bp, Saccharomyces pastorianus
ctaacagaccttttggatatttcga

SEQ ID NO: 188718 - DNA, 25 bp, Saccharomyces pastorianus
tactacggggcctgctaacaataca

SEQ ID NO: 188719 - DNA, 25 bp, Saccharomyces pastorianus
gctctaacagaccttttggatattt

SEQ ID NO: 188720 - DNA, 25 bp, Saccharomyces pastorianus
atatgaataattccactactacggg

SEQ ID NO: 188721 - DNA, 25 bp, Saccharomyces pastorianus
gggcctgctaacaatacaagctcta

SEQ ID NO: 188722 - DNA, 25 bp, Saccharomyces pastorianus
cacaggcggcacaagcggcgcaagc

SEQ ID NO: 188723 - DNA, 25 bp, Saccharomyces pastorianus
agctcaagctcattctcaggcacag

SEQ ID NO: 188724 - DNA, 25 bp, Saccharomyces pastorianus
agcacaagcacacgctcagcaccag

SEQ ID NO: 188725 - DNA, 25 bp, Saccharomyces pastorianus
acaagcggcgcaagcgcaagcacaa

SEQ ID NO: 188726 - DNA, 25 bp, Saccharomyces pastorianus
acaagcacaagcacacgctcagcac

SEQ ID NO: 188727 - DNA, 25 bp, Saccharomyces pastorianus
aggcacaggcacaggcacaagccca

SEQ ID NO: 188728 - DNA, 25 bp, Saccharomyces pastorianus
agcacaggcggcacaagcggcgcaa

SEQ ID NO: 188729 - DNA, 25 bp, Saccharomyces pastorianus
acaggcggcacaagcggcgcaagcg

SEQ ID NO: 188730 - DNA, 25 bp, Saccharomyces pastorianus
aagcccaggcgcaggcccaagccca

SEQ ID NO: 188731 - DNA, 25 bp, Saccharomyces pastorianus
aagcacacgctcagcaccagccctc

SEQ ID NO: 188732 - DNA, 25 bp, Saccharomyces pastorianus
aagcacaagcacacgctcagcacca

SEQ ID NO: 188733 - DNA, 25 bp, Saccharomyces pastorianus
tgctactgcttctgcaaccaccact

SEQ ID NO: 188734 - DNA, 25 bp, Saccharomyces pastorianus
actgcttctgcaaccaccactctag

SEQ ID NO: 188735 - DNA, 25 bp, Saccharomyces pastorianus
tgcttctgcaaccaccactctagct

SEQ ID NO: 188736 - DNA, 25 bp, Saccharomyces pastorianus
atcgctgctactgcttctgcaacca

SEQ ID NO: 188737 - DNA, 25 bp, Saccharomyces pastorianus
gctgctactgcttctgcaaccacca

SEQ ID NO: 188738 - DNA, 25 bp, Saccharomyces pastorianus
tgccatcgctgctactgcttctgca

SEQ ID NO: 188739 - DNA, 25 bp, Saccharomyces pastorianus
tgtctacgtctctgatatcagacct

SEQ ID NO: 188740 - DNA, 25 bp, Saccharomyces pastorianus
gccatcgctgctactgcttctgcaa

SEQ ID NO: 188741 - DNA, 25 bp, Saccharomyces pastorianus
ttctgcaaccaccactctagctcaa

SEQ ID NO: 188742 - DNA, 25 bp, Saccharomyces pastorianus
ggtggaattgggtgtctacgtctct

SEQ ID NO: 188743 - DNA, 25 bp, Saccharomyces pastorianus
tactgcttctgcaaccaccactcta

SEQ ID NO: 188744 - DNA, 25 bp, Saccharomyces pastorianus
catcccgatttaactcaagagatta

SEQ ID NO: 188745 - DNA, 25 bp, Saccharomyces pastorianus
ttcattcccagagtacatcccgatt

SEQ ID NO: 188746 - DNA, 25 bp, Saccharomyces pastorianus
tcccagagtacatcccgatttaact

SEQ ID NO: 188747 - DNA, 25 bp, Saccharomyces pastorianus
tgacttcattcccagagtacatccc

SEQ ID NO: 188748 - DNA, 25 bp, Saccharomyces pastorianus
tgtcagtcatcttcctccattaggg

SEQ ID NO: 188749 - DNA, 25 bp, Saccharomyces pastorianus
aaatgacttcattcccagagtacat

SEQ ID NO: 188750 - DNA, 25 bp, Saccharomyces pastorianus
gtacatcccgatttaactcaagaga

SEQ ID NO: 188751 - DNA, 25 bp, Saccharomyces pastorianus
gtaaagtggattacgacttggacac

SEQ ID NO: 188752 - DNA, 25 bp, Saccharomyces pastorianus
gggagagtactcatttttaaatgac

SEQ ID NO: 188753 - DNA, 25 bp, Saccharomyces pastorianus
attcccagagtacatcccgatttaa

SEQ ID NO: 188754 - DNA, 25 bp, Saccharomyces pastorianus
aatgtcagtcatcttcctccattag

SEQ ID NO: 188755 - DNA, 25 bp, Saccharomyces pastorianus
gccatcttatcgtcttaccagagga

SEQ ID NO: 188756 - DNA, 25 bp, Saccharomyces pastorianus
gaattatactgctactcaggatgat

SEQ ID NO: 188757 - DNA, 25 bp, Saccharomyces pastorianus
aatgggtgaaatgtgccttatgtcc

SEQ ID NO: 188758 - DNA, 25 bp, Saccharomyces pastorianus
gacgctcaatattacggaacacttc

SEQ ID NO: 188759 - DNA, 25 bp, Saccharomyces pastorianus
gttccagattgggtctagtagtgct

SEQ ID NO: 188760 - DNA, 25 bp, Saccharomyces pastorianus
ggtgttccactatttagacgctcaa

SEQ ID NO: 188761 - DNA, 25 bp, Saccharomyces pastorianus
gaagctgttagtgtaggtgccatct

SEQ ID NO: 188762 - DNA, 25 bp, Saccharomyces pastorianus
ggaacacttctaacaacgtcgagtt

SEQ ID NO: 188763 - DNA, 25 bp, Saccharomyces pastorianus
gattgccctgggaaatatataccca

SEQ ID NO: 188764 - DNA, 25 bp, Saccharomyces pastorianus
aggaatgtccttgcctatgatgcaa

SEQ ID NO: 188765 - DNA, 25 bp, Saccharomyces pastorianus
gatgcaaccggtgttacagaaactt

SEQ ID NO: 188766 - DNA, 25 bp, Saccharomyces pastorianus
ttgatgctggcagtggtagtcgcat

SEQ ID NO: 188767 - DNA, 25 bp, Saccharomyces pastorianus
cctgcaggtctgttggagttggtac

SEQ ID NO: 188768 - DNA, 25 bp, Saccharomyces pastorianus
gcaggtctgttggagttggtacttt

SEQ ID NO: 188769 - DNA, 25 bp, Saccharomyces pastorianus
tgcaggtctgttggagttggtactt

SEQ ID NO: 188770 - DNA, 25 bp, Saccharomyces pastorianus
ctgcaggtctgttggagttggtact

SEQ ID NO: 188771 - DNA, 25 bp, Saccharomyces pastorianus
aggtctgttggagttggtactttca

SEQ ID NO: 188772 - DNA, 25 bp, Saccharomyces pastorianus
gatgctggcagtggtagtcgcatta

SEQ ID NO: 188773 - DNA, 25 bp, Saccharomyces pastorianus
gatgctggcagtggtagtcgcacta

SEQ ID NO: 188774 - DNA, 25 bp, Saccharomyces pastorianus
gtctgttggagttggtactttcagt

SEQ ID NO: 188775 - DNA, 25 bp, Saccharomyces pastorianus
atgctggcagtggtagtcgcattag

SEQ ID NO: 188776 - DNA, 25 bp, Saccharomyces pastorianus
tcggtggtagtcgcactagtcctga

SEQ ID NO: 188777 - DNA, 25 bp, Saccharomyces pastorianus
ctgccaatgcggatgtaagagggtt

SEQ ID NO: 188778 - DNA, 25 bp, Saccharomyces pastorianus
acaactgccacaggaaactgccaat

SEQ ID NO: 188779 - DNA, 25 bp, Saccharomyces pastorianus
gagtgatccagtcgacgcttgcaaa

SEQ ID NO: 188780 - DNA, 25 bp, Saccharomyces pastorianus
taaataatgaactggctgctcttga

SEQ ID NO: 188781 - DNA, 25 bp, Saccharomyces pastorianus
gacgcttgcaaagaaatctccataa

SEQ ID NO: 188782 - DNA, 25 bp, Saccharomyces pastorianus
gggtttttcctcagggataatggca

SEQ ID NO: 188783 - DNA, 25 bp, Saccharomyces pastorianus
ggataatggcataccctttcgcagg

SEQ ID NO: 188784 - DNA, 25 bp, Saccharomyces pastorianus
ctcacctgtgtgttctctacaagaa

SEQ ID NO: 188785 - DNA, 25 bp, Saccharomyces pastorianus
ttctctacaagaagcacaactgcca

SEQ ID NO: 188786 - DNA, 25 bp, Saccharomyces pastorianus
gaaaaatttactgactcacctgtgt

SEQ ID NO: 188787 - DNA, 25 bp, Saccharomyces pastorianus
accctttcgcaggtggaatatccta

SEQ ID NO: 188788 - DNA, 25 bp, Saccharomyces pastorianus
gtactggtacaacttagccaaggca

SEQ ID NO: 188789 - DNA, 25 bp, Saccharomyces pastorianus
aatgacaaggattacgccgccgcag

SEQ ID NO: 188790 - DNA, 25 bp, Saccharomyces pastorianus
cgacgaagctggtgtgaagctgctt

SEQ ID NO: 188791 - DNA, 25 bp, Saccharomyces pastorianus
ccgccgcagtgaagttgaccgtgga

SEQ ID NO: 188792 - DNA, 25 bp, Saccharomyces pastorianus
agcccagttgggacaatgctacaat

SEQ ID NO: 188793 - DNA, 25 bp, Saccharomyces pastorianus
gtacaacttagccaaggcattcaaa

SEQ ID NO: 188794 - DNA, 25 bp, Saccharomyces pastorianus
caagatattgaagcccagttgggac

SEQ ID NO: 188795 - DNA, 25 bp, Saccharomyces pastorianus
ccgtggagctaaagtactggtacaa

SEQ ID NO: 188796 - DNA, 25 bp, Saccharomyces pastorianus
gggacaatgctacaatgacaaggat

SEQ ID NO: 188797 - DNA, 25 bp, Saccharomyces pastorianus
aagttgaccgtggagctaaagtact

SEQ ID NO: 188798 - DNA, 25 bp, Saccharomyces pastorianus
attacgccgccgcagtgaagttgac

SEQ ID NO: 188799 - DNA, 25 bp, Saccharomyces pastorianus
gcttgtgtgcattcgagtctaccaa

SEQ ID NO: 188800 - DNA, 25 bp, Saccharomyces pastorianus
aacagtccactatatgccggtgtca

SEQ ID NO: 188801 - DNA, 25 bp, Saccharomyces pastorianus
cgattattctcacccaattgcattt

SEQ ID NO: 188802 - DNA, 25 bp, Saccharomyces pastorianus
attttctatccttatgcgcttcaga

SEQ ID NO: 188803 - DNA, 25 bp, Saccharomyces pastorianus
tctggtgtagcgcaaacttttggtc

SEQ ID NO: 188804 - DNA, 25 bp, Saccharomyces pastorianus
gaaccggattccaaaactgcacata

SEQ ID NO: 188805 - DNA, 25 bp, Saccharomyces pastorianus
aaccttttcggttatggcatcagtt

SEQ ID NO: 188806 - DNA, 25 bp, Saccharomyces pastorianus
atgcttgcctattttcgtgtattta

SEQ ID NO: 188807 - DNA, 25 bp, Saccharomyces pastorianus
gagggcattttggtgcatcccagaa

SEQ ID NO: 188808 - DNA, 25 bp, Saccharomyces pastorianus
gcccttgctgggtcgattattctca

SEQ ID NO: 188809 - DNA, 25 bp, Saccharomyces pastorianus
gtgtcaagctagttcccctaataat

SEQ ID NO: 188810 - DNA, 25 bp, Saccharomyces pastorianus
tggtgcttccagacgtacagctaaa

SEQ ID NO: 188811 - DNA, 25 bp, Saccharomyces pastorianus
gattgagagagctacgcgcgaagaa

SEQ ID NO: 188812 - DNA, 25 bp, Saccharomyces pastorianus
gctccttctgagacgtcaacacaag

SEQ ID NO: 188813 - DNA, 25 bp, Saccharomyces pastorianus
ggaggagaacccatacgccttttat

SEQ ID NO: 188814 - DNA, 25 bp, Saccharomyces pastorianus
gaatcattcttcaccagatacacag

SEQ ID NO: 188815 - DNA, 25 bp, Saccharomyces pastorianus
aattgcagaattactcgccgattgt

SEQ ID NO: 188816 - DNA, 25 bp, Saccharomyces pastorianus
tatcccagaaatacctgttccagag

SEQ ID NO: 188817 - DNA, 25 bp, Saccharomyces pastorianus
ggtactgcaaagactggtgcttcca

SEQ ID NO: 188818 - DNA, 25 bp, Saccharomyces pastorianus
atgacgtttctgttgctccttctga

SEQ ID NO: 188819 - DNA, 25 bp, Saccharomyces pastorianus
ttgtcgatcccggtttaggcgaagg

SEQ ID NO: 188820 - DNA, 25 bp, Saccharomyces pastorianus
gaatatttggttcagtcagtcggaa

SEQ ID NO: 188821 - DNA, 25 bp, Saccharomyces pastorianus
ttagtagtataccaacccgaggaga

SEQ ID NO: 188822 - DNA, 25 bp, Saccharomyces pastorianus
tttcaagacgaaatgctagccctca

SEQ ID NO: 188823 - DNA, 25 bp, Saccharomyces pastorianus
atgagaaaatcatcacgcccttacc

SEQ ID NO: 188824 - DNA, 25 bp, Saccharomyces pastorianus
tgggaaacccagcttttaagcaaag

SEQ ID NO: 188825 - DNA, 25 bp, Saccharomyces pastorianus
gaaggcacagaagtcattatctaga

SEQ ID NO: 188826 - DNA, 25 bp, Saccharomyces pastorianus
ttcagaggctggcagtagctccgaa

SEQ ID NO: 188827 - DNA, 25 bp, Saccharomyces pastorianus
cggtacttttcccagacgatgatga

SEQ ID NO: 188828 - DNA, 25 bp, Saccharomyces pastorianus
atgctagccctcacggataatcaaa

SEQ ID NO: 188829 - DNA, 25 bp, Saccharomyces pastorianus
ggagattacgaacttcagtgacgat

SEQ ID NO: 188830 - DNA, 25 bp, Saccharomyces pastorianus
ttaagtgattcttcagaggctggca

SEQ ID NO: 188831 - DNA, 25 bp, Saccharomyces pastorianus
aatgaagtgccctacagagctaatg

SEQ ID NO: 188832 - DNA, 25 bp, Saccharomyces pastorianus
catcacgtggtttgtttgaagggat

SEQ ID NO: 188833 - DNA, 25 bp, Saccharomyces pastorianus
gtgtacaccatcacgtggtttgttt

SEQ ID NO: 188834 - DNA, 25 bp, Saccharomyces pastorianus
tggtttgtttgaagggattggtccg

SEQ ID NO: 188835 - DNA, 25 bp, Saccharomyces pastorianus
caacgtgtacaccatcacgtggttt

SEQ ID NO: 188836 - DNA, 25 bp, Saccharomyces pastorianus
tcacgtggtttgtttgaagggattg

SEQ ID NO: 188837 - DNA, 25 bp, Saccharomyces pastorianus
aacaacgtgtacaccatcacgtggt

SEQ ID NO: 188838 - DNA, 25 bp, Saccharomyces pastorianus
ccatcacgtggtttgtttgaaggga

SEQ ID NO: 188839 - DNA, 25 bp, Saccharomyces pastorianus
gaaacaacgtgtacaccatcacgtg

SEQ ID NO: 188840 - DNA, 25 bp, Saccharomyces pastorianus
accatcacgtggtttgtttgaaggg

SEQ ID NO: 188841 - DNA, 25 bp, Saccharomyces pastorianus
gtacaccatcacgtggtttgtttga

SEQ ID NO: 188842 - DNA, 25 bp, Saccharomyces pastorianus
acgtgtacaccatcacgtggtttgt

SEQ ID NO: 188843 - DNA, 25 bp, Saccharomyces pastorianus
atgaccatcccacatatgaaatacg

SEQ ID NO: 188844 - DNA, 25 bp, Saccharomyces pastorianus
gtaagccccacacaagataaagacg

SEQ ID NO: 188845 - DNA, 25 bp, Saccharomyces pastorianus
gccccacacaagataaagacgcgat

SEQ ID NO: 188846 - DNA, 25 bp, Saccharomyces pastorianus
gccgtatcaaagactagcgaaaata

SEQ ID NO: 188847 - DNA, 25 bp, Saccharomyces pastorianus
tcaaatacagtaagccccacacaag

SEQ ID NO: 188848 - DNA, 25 bp, Saccharomyces pastorianus
aaaagtagcacagccggattccttg

SEQ ID NO: 188849 - DNA, 25 bp, Saccharomyces pastorianus
agacgcgatcagaaaacaacccgat

SEQ ID NO: 188850 - DNA, 25 bp, Saccharomyces pastorianus
atcccacatatgaaatacgccgtat

SEQ ID NO: 188851 - DNA, 25 bp, Saccharomyces pastorianus
ataatgatgaaccttcacataagaa

SEQ ID NO: 188852 - DNA, 25 bp, Saccharomyces pastorianus
agaaaacaacccgatgacattataa

SEQ ID NO: 188853 - DNA, 25 bp, Saccharomyces pastorianus
gaaatacgccgtatcaaagactagc

SEQ ID NO: 188854 - DNA, 25 bp, Saccharomyces pastorianus
gagttcagtatttaaattcaacaca

SEQ ID NO: 188855 - DNA, 25 bp, Saccharomyces pastorianus
tccggagcaacttcgtccaaacaag

SEQ ID NO: 188856 - DNA, 25 bp, Saccharomyces pastorianus
gcaacttcgtccaaacaagtctctg

SEQ ID NO: 188857 - DNA, 25 bp, Saccharomyces pastorianus
agaagtactccggagcaacttcgtc

SEQ ID NO: 188858 - DNA, 25 bp, Saccharomyces pastorianus
gtctctgccgagaaacatttgagtt

SEQ ID NO: 188859 - DNA, 25 bp, Saccharomyces pastorianus
gtactccggagcaacttcgtccaaa

SEQ ID NO: 188860 - DNA, 25 bp, Saccharomyces pastorianus
cgtccaaacaagtctctgccgagaa

SEQ ID NO: 188861 - DNA, 25 bp, Saccharomyces pastorianus
gccgagaaacatttgagttcagtat

SEQ ID NO: 188862 - DNA, 25 bp, Saccharomyces pastorianus
taaattcaacacagatctaggtcag

SEQ ID NO: 188863 - DNA, 25 bp, Saccharomyces pastorianus
ttcgtccaaacaagtctctgccgag

SEQ ID NO: 188864 - DNA, 25 bp, Saccharomyces pastorianus
gctgcgaaaaagaagtactccggag

SEQ ID NO: 188865 - DNA, 25 bp, Saccharomyces pastorianus
gccgtatccgctgattttcatgatg

SEQ ID NO: 188866 - DNA, 25 bp, Saccharomyces pastorianus
gtatgaggcaccactactcagagat

SEQ ID NO: 188867 - DNA, 25 bp, Saccharomyces pastorianus
cataggcaatacaggcttcccaatt

SEQ ID NO: 188868 - DNA, 25 bp, Saccharomyces pastorianus
aatggtttcctttgatactgcgccg

SEQ ID NO: 188869 - DNA, 25 bp, Saccharomyces pastorianus
gcattcagcaacttgggtctgtctt

SEQ ID NO: 188870 - DNA, 25 bp, Saccharomyces pastorianus
gctgtgctgcattctcatggtatac

SEQ ID NO: 188871 - DNA, 25 bp, Saccharomyces pastorianus
aagtcttgggtttctcttggatcat

SEQ ID NO: 188872 - DNA, 25 bp, Saccharomyces pastorianus
ggatcatccgccaggtgttgtacgt

SEQ ID NO: 188873 - DNA, 25 bp, Saccharomyces pastorianus
attttggcgtttgtgaccatcgttc

SEQ ID NO: 188874 - DNA, 25 bp, Saccharomyces pastorianus
tcgtgctttgagattgctgtgctgc

SEQ ID NO: 188875 - DNA, 25 bp, Saccharomyces pastorianus
ggatcatgttcaagacctcgagaga

SEQ ID NO: 188876 - DNA, 25 bp, Saccharomyces pastorianus
cacagctgttttcaatgcaagacga

SEQ ID NO: 188877 - DNA, 25 bp, Saccharomyces pastorianus
agacaccattgtaggtgttgtggaa

SEQ ID NO: 188878 - DNA, 25 bp, Saccharomyces pastorianus
taatcttgccaggtggcaggcagac

SEQ ID NO: 188879 - DNA, 25 bp, Saccharomyces pastorianus
tgttcgtcttgtaccgaaaattttg

SEQ ID NO: 188880 - DNA, 25 bp, Saccharomyces pastorianus
gaagctcacagctgttttcaatgca

SEQ ID NO: 188881 - DNA, 25 bp, Saccharomyces pastorianus
gtttctcgtaagaagacaccattgt

SEQ ID NO: 188882 - DNA, 25 bp, Saccharomyces pastorianus
tgtggaaggatattttgttcgtctt

SEQ ID NO: 188883 - DNA, 25 bp, Saccharomyces pastorianus
gtatcaataatcttgccaggtggca

SEQ ID NO: 188884 - DNA, 25 bp, Saccharomyces pastorianus
tggcaggcagacgaggaagctcaca

SEQ ID NO: 188885 - DNA, 25 bp, Saccharomyces pastorianus
gaggactgtatcaataatcttgcca

SEQ ID NO: 188886 - DNA, 25 bp, Saccharomyces pastorianus
gcaagacgaacttttcgtttctcgt

SEQ ID NO: 188887 - DNA, 25 bp, Saccharomyces pastorianus
ataagaacttcccaaatttctgtga

SEQ ID NO: 188888 - DNA, 25 bp, Saccharomyces pastorianus
acttcccaaatttctgtgaaccgat

SEQ ID NO: 188889 - DNA, 25 bp, Saccharomyces pastorianus
taagaacttcccaaatttctgtgaa

SEQ ID NO: 188890 - DNA, 25 bp, Saccharomyces pastorianus
cttcccaaatttctgtgaaccgata

SEQ ID NO: 188891 - DNA, 25 bp, Saccharomyces pastorianus
tgtattgcccgaacacctaattagt

SEQ ID NO: 188892 - DNA, 25 bp, Saccharomyces pastorianus
gaacttcccaaatttctgtgaaccg

SEQ ID NO: 188893 - DNA, 25 bp, Saccharomyces pastorianus
aaatttctgtgaaccgatatcaagt

SEQ ID NO: 188894 - DNA, 25 bp, Saccharomyces pastorianus
ccaaatttctgtgaaccgatatcaa

SEQ ID NO: 188895 - DNA, 25 bp, Saccharomyces pastorianus
accgatatcaagttgtattgcccga

SEQ ID NO: 188896 - DNA, 25 bp, Saccharomyces pastorianus
ttcccaaatttctgtgaaccgatat

SEQ ID NO: 188897 - DNA, 25 bp, Saccharomyces pastorianus
tcccaaatttctgtgaaccgatatc

SEQ ID NO: 188898 - DNA, 25 bp, Saccharomyces pastorianus
aagatgggctcgaaatatcgaagat

SEQ ID NO: 188899 - DNA, 25 bp, Saccharomyces pastorianus
ggtgctctgtttgcaagttccaatg

SEQ ID NO: 188900 - DNA, 25 bp, Saccharomyces pastorianus
tatcgaagatgaaatcgcagatcta

SEQ ID NO: 188901 - DNA, 25 bp, Saccharomyces pastorianus
aacggtgctctgtttgcaagttcca

SEQ ID NO: 188902 - DNA, 25 bp, Saccharomyces pastorianus
gcttgtgaaaagatgggctcgaaat

SEQ ID NO: 188903 - DNA, 25 bp, Saccharomyces pastorianus
ctgggtcgctgtgcttgtgaaaaga

SEQ ID NO: 188904 - DNA, 25 bp, Saccharomyces pastorianus
gctctgtttgcaagttccaatgttt

SEQ ID NO: 188905 - DNA, 25 bp, Saccharomyces pastorianus
atgtttttattctgggtcgctgtgc

SEQ ID NO: 188906 - DNA, 25 bp, Saccharomyces pastorianus
ttctgggtcgctgtgcttgtgaaaa

SEQ ID NO: 188907 - DNA, 25 bp, Saccharomyces pastorianus
tgcaagttccaatgtttttattctg

SEQ ID NO: 188908 - DNA, 25 bp, Saccharomyces pastorianus
aaaaaacggtgctctgtttgcaagt

SEQ ID NO: 188909 - DNA, 25 bp, Saccharomyces pastorianus
ttttcctaataagactaccgtagag

SEQ ID NO: 188910 - DNA, 25 bp, Saccharomyces pastorianus
gccttgttaacgcttctctggaaga

SEQ ID NO: 188911 - DNA, 25 bp, Saccharomyces pastorianus
attgaataatccaaactcggccata

SEQ ID NO: 188912 - DNA, 25 bp, Saccharomyces pastorianus
aacttaatatcgttcccgtcatcta

SEQ ID NO: 188913 - DNA, 25 bp, Saccharomyces pastorianus
gaaaacgatgtgtgcataattgcga

SEQ ID NO: 188914 - DNA, 25 bp, Saccharomyces pastorianus
tggacctagttttcctaataagact

SEQ ID NO: 188915 - DNA, 25 bp, Saccharomyces pastorianus
gttatgcaattttcgctcttgcgga

SEQ ID NO: 188916 - DNA, 25 bp, Saccharomyces pastorianus
gaaatccttcatcaagccttgttaa

SEQ ID NO: 188917 - DNA, 25 bp, Saccharomyces pastorianus
ccgtcatctaatattttcagcgaaa

SEQ ID NO: 188918 - DNA, 25 bp, Saccharomyces pastorianus
aaagatgagctttttggacctagtt

SEQ ID NO: 188919 - DNA, 25 bp, Saccharomyces pastorianus
atcgttcccgtcatctaatattttc

SEQ ID NO: 188920 - DNA, 25 bp, Saccharomyces pastorianus
ttacgtgggcatagatcacgcttca

SEQ ID NO: 188921 - DNA, 25 bp, Saccharomyces pastorianus
acgtgggcatagatcacgcttcagc

SEQ ID NO: 188922 - DNA, 25 bp, Saccharomyces pastorianus
cgtgggcatagatcacgcttcagcc

SEQ ID NO: 188923 - DNA, 25 bp, Saccharomyces pastorianus
gtttacgtgggcatagatcacgctt

SEQ ID NO: 188924 - DNA, 25 bp, Saccharomyces pastorianus
cgcttcagccgctctgtgtcgactt

SEQ ID NO: 188925 - DNA, 25 bp, Saccharomyces pastorianus
tttacgtgggcatagatcacgcttc

SEQ ID NO: 188926 - DNA, 25 bp, Saccharomyces pastorianus
tacgtgggcatagatcacgcttcag

SEQ ID NO: 188927 - DNA, 25 bp, Saccharomyces pastorianus
cttcagccgctctgtgtcgactttc

SEQ ID NO: 188928 - DNA, 25 bp, Saccharomyces pastorianus
atgggtttacgtgggcatagatcac

SEQ ID NO: 188929 - DNA, 25 bp, Saccharomyces pastorianus
tgggtttacgtgggcatagatcacg

SEQ ID NO: 188930 - DNA, 25 bp, Saccharomyces pastorianus
gcttcagccgctctgtgtcgacttt

SEQ ID NO: 188931 - DNA, 25 bp, Saccharomyces pastorianus
gaaatatcctggtcgtgtggcatgg

SEQ ID NO: 188932 - DNA, 25 bp, Saccharomyces pastorianus
ggccctcagattataccggtatcta

SEQ ID NO: 188933 - DNA, 25 bp, Saccharomyces pastorianus
tatcccagcgctgaggtcagacctt

SEQ ID NO: 188934 - DNA, 25 bp, Saccharomyces pastorianus
atctattgcggcgataattctgggt

SEQ ID NO: 188935 - DNA, 25 bp, Saccharomyces pastorianus
ttagggtatgtaaccgccacgacca

SEQ ID NO: 188936 - DNA, 25 bp, Saccharomyces pastorianus
aatgagcggagtatcctacgcatta

SEQ ID NO: 188937 - DNA, 25 bp, Saccharomyces pastorianus
ggactttcaaaaggcctttagctat

SEQ ID NO: 188938 - DNA, 25 bp, Saccharomyces pastorianus
attcctattgggatattgttcgcta

SEQ ID NO: 188939 - DNA, 25 bp, Saccharomyces pastorianus
ggtcgtgtggcatggaattcctatt

SEQ ID NO: 188940 - DNA, 25 bp, Saccharomyces pastorianus
tcagaccttcccaactatcaaaatg

SEQ ID NO: 188941 - DNA, 25 bp, Saccharomyces pastorianus
gtgctactagccataagtgctttgt

SEQ ID NO: 188942 - DNA, 25 bp, Saccharomyces pastorianus
atcagcaccagctgtttctggacaa

SEQ ID NO: 188943 - DNA, 25 bp, Saccharomyces pastorianus
ggattctgcccagcagcagtagcaa

SEQ ID NO: 188944 - DNA, 25 bp, Saccharomyces pastorianus
aaggcctttctggacagcttcgaag

SEQ ID NO: 188945 - DNA, 25 bp, Saccharomyces pastorianus
ggagcagtccatacaattctcgtcg

SEQ ID NO: 188946 - DNA, 25 bp, Saccharomyces pastorianus
atagatctggacgacgagccccgca

SEQ ID NO: 188947 - DNA, 25 bp, Saccharomyces pastorianus
gaggacgccgacgacgacattatat

SEQ ID NO: 188948 - DNA, 25 bp, Saccharomyces pastorianus
aatgcggacaacacgtacatcacga

SEQ ID NO: 188949 - DNA, 25 bp, Saccharomyces pastorianus
tacgggccctgcagacaatgtgagc

SEQ ID NO: 188950 - DNA, 25 bp, Saccharomyces pastorianus
tggacgagatgtttgcccggcagaa

SEQ ID NO: 188951 - DNA, 25 bp, Saccharomyces pastorianus
aatgtgagcgccaacaaggcctttc

SEQ ID NO: 188952 - DNA, 25 bp, Saccharomyces pastorianus
aacaatgacagcagccgcgttgacg

SEQ ID NO: 188953 - DNA, 25 bp, Saccharomyces pastorianus
tcctcgaggagaatttataatatag

SEQ ID NO: 188954 - DNA, 25 bp, Saccharomyces pastorianus
atattatagcttctaacgacaatgg

SEQ ID NO: 188955 - DNA, 25 bp, Saccharomyces pastorianus
gccagttcctcaaaaagatccatgt

SEQ ID NO: 188956 - DNA, 25 bp, Saccharomyces pastorianus
ttgtccgccagttcctcaaaaagat

SEQ ID NO: 188957 - DNA, 25 bp, Saccharomyces pastorianus
ctaacgacaatggaattctaacaat

SEQ ID NO: 188958 - DNA, 25 bp, Saccharomyces pastorianus
tccgccagttcctcaaaaagatcca

SEQ ID NO: 188959 - DNA, 25 bp, Saccharomyces pastorianus
aattgtccgccagttcctcaaaaag

SEQ ID NO: 188960 - DNA, 25 bp, Saccharomyces pastorianus
caaattgtccgccagttcctcaaaa

SEQ ID NO: 188961 - DNA, 25 bp, Saccharomyces pastorianus
attatcaaattgtccgccagttcct

SEQ ID NO: 188962 - DNA, 25 bp, Saccharomyces pastorianus
gttcctcaaaaagatccatgtataa

SEQ ID NO: 188963 - DNA, 25 bp, Saccharomyces pastorianus
tagcttctaacgacaatggaattct

SEQ ID NO: 188964 - DNA, 25 bp, Saccharomyces pastorianus
attaatgacgtatgaccaaagttat

SEQ ID NO: 188965 - DNA, 25 bp, Saccharomyces pastorianus
aacgcttcggacataacgttccaga

SEQ ID NO: 188966 - DNA, 25 bp, Saccharomyces pastorianus
gtggcaacgcttcggacataacgtt

SEQ ID NO: 188967 - DNA, 25 bp, Saccharomyces pastorianus
tccagagacacagtcaggagttcgc

SEQ ID NO: 188968 - DNA, 25 bp, Saccharomyces pastorianus
acataacgttccagagacacagtca

SEQ ID NO: 188969 - DNA, 25 bp, Saccharomyces pastorianus
gtctctgatacgagtggcaacgctt

SEQ ID NO: 188970 - DNA, 25 bp, Saccharomyces pastorianus
gcttcggacataacgttccagagac

SEQ ID NO: 188971 - DNA, 25 bp, Saccharomyces pastorianus
catggatattaatgacgtatgacca

SEQ ID NO: 188972 - DNA, 25 bp, Saccharomyces pastorianus
tagcagcggtaccagaggtctctga

SEQ ID NO: 188973 - DNA, 25 bp, Saccharomyces pastorianus
aacgttccagagacacagtcaggag

SEQ ID NO: 188974 - DNA, 25 bp, Saccharomyces pastorianus
agaggtctctgatacgagtggcaac

SEQ ID NO: 188975 - DNA, 25 bp, Saccharomyces pastorianus
aggcttttacacactacctaggtga

SEQ ID NO: 188976 - DNA, 25 bp, Saccharomyces pastorianus
gaatatcctcttacacttaacctaa

SEQ ID NO: 188977 - DNA, 25 bp, Saccharomyces pastorianus
gttgcacctagccaagtaccttggg

SEQ ID NO: 188978 - DNA, 25 bp, Saccharomyces pastorianus
tgattgacctgaattttccgaccaa

SEQ ID NO: 188979 - DNA, 25 bp, Saccharomyces pastorianus
ttattgttgcaccagataccagccc

SEQ ID NO: 188980 - DNA, 25 bp, Saccharomyces pastorianus
gcaccctggtcacagcatttcaaaa

SEQ ID NO: 188981 - DNA, 25 bp, Saccharomyces pastorianus
ataccagcccacgtggagaagatgt

SEQ ID NO: 188982 - DNA, 25 bp, Saccharomyces pastorianus
gaccatagctattacttcattgcga

SEQ ID NO: 188983 - DNA, 25 bp, Saccharomyces pastorianus
gtgaatgcaacacaagcaccctggt

SEQ ID NO: 188984 - DNA, 25 bp, Saccharomyces pastorianus
ggccaaggcgcaggattctatgtga

SEQ ID NO: 188985 - DNA, 25 bp, Saccharomyces pastorianus
gtatttctgcttttgcaccaattgt

SEQ ID NO: 188986 - DNA, 25 bp, Saccharomyces pastorianus
tacgagaatgctacaccaggtacta

SEQ ID NO: 188987 - DNA, 25 bp, Saccharomyces pastorianus
gacatggacccatattcacgagaat

SEQ ID NO: 188988 - DNA, 25 bp, Saccharomyces pastorianus
ggcgatcctttcaagccaagtttaa

SEQ ID NO: 188989 - DNA, 25 bp, Saccharomyces pastorianus
gatgcgtccatggttcttcatgata

SEQ ID NO: 188990 - DNA, 25 bp, Saccharomyces pastorianus
taccatcataaagctggcgatcctt

SEQ ID NO: 188991 - DNA, 25 bp, Saccharomyces pastorianus
aaggaaactccttcgttcgatgcgt

SEQ ID NO: 188992 - DNA, 25 bp, Saccharomyces pastorianus
gaaaaccgttcttctcaacgatatg

SEQ ID NO: 188993 - DNA, 25 bp, Saccharomyces pastorianus
gattttgatcatgtcgggtacaggc

SEQ ID NO: 188994 - DNA, 25 bp, Saccharomyces pastorianus
gggccagttaatccgttgcgtcgaa

SEQ ID NO: 188995 - DNA, 25 bp, Saccharomyces pastorianus
tgaggacgattctaagggccagtta

SEQ ID NO: 188996 - DNA, 25 bp, Saccharomyces pastorianus
gaacttagagaggtcacgcaactat

SEQ ID NO: 188997 - DNA, 25 bp, Saccharomyces pastorianus
ggcgatgtcattaaccctgatgttg

SEQ ID NO: 188998 - DNA, 25 bp, Saccharomyces pastorianus
gaatagcatgtcaccaagcgcttgg

SEQ ID NO: 188999 - DNA, 25 bp, Saccharomyces pastorianus
gcaggtgctgcctcaagatgttgac

SEQ ID NO: 189000 - DNA, 25 bp, Saccharomyces pastorianus
aagtattgccgatttgtatcctgtc

SEQ ID NO: 189001 - DNA, 25 bp, Saccharomyces pastorianus
aaactacttcgaggatttgccacag

SEQ ID NO: 189002 - DNA, 25 bp, Saccharomyces pastorianus
taaccgctgtgtggcctttgagtga

SEQ ID NO: 189003 - DNA, 25 bp, Saccharomyces pastorianus
agggtgattttattctgcgggtatt

SEQ ID NO: 189004 - DNA, 25 bp, Saccharomyces pastorianus
ttgccagcgccctgatactaatcat

SEQ ID NO: 189005 - DNA, 25 bp, Saccharomyces pastorianus
gacattcctggcattactgatgaca

SEQ ID NO: 189006 - DNA, 25 bp, Saccharomyces pastorianus
ttctcgaaggagtcacgcaggtgct

SEQ ID NO: 189007 - DNA, 25 bp, Saccharomyces pastorianus
aagcgcttggatctttcatgtcaaa

SEQ ID NO: 189008 - DNA, 25 bp, Saccharomyces pastorianus
ccatgtggaacgcttatgatgcatt

SEQ ID NO: 189009 - DNA, 25 bp, Saccharomyces pastorianus
caacgccatgtggaacgcttatgat

SEQ ID NO: 189010 - DNA, 25 bp, Saccharomyces pastorianus
gcagtatcccctcaagacaggtttg

SEQ ID NO: 189011 - DNA, 25 bp, Saccharomyces pastorianus
cgccatgtggaacgcttatgatgca

SEQ ID NO: 189012 - DNA, 25 bp, Saccharomyces pastorianus
aacgccatgtggaacgcttatgatg

SEQ ID NO: 189013 - DNA, 25 bp, Saccharomyces pastorianus
atgtggaacgcttatgatgcattct

SEQ ID NO: 189014 - DNA, 25 bp, Saccharomyces pastorianus
ggaacgcttatgatgcattctccaa

SEQ ID NO: 189015 - DNA, 25 bp, Saccharomyces pastorianus
atatttaatccgcagtatcccctca

SEQ ID NO: 189016 - DNA, 25 bp, Saccharomyces pastorianus
gtttgaaccggttttcaacgccatg

SEQ ID NO: 189017 - DNA, 25 bp, Saccharomyces pastorianus
ccatcatctcctatatttaatccgc

SEQ ID NO: 189018 - DNA, 25 bp, Saccharomyces pastorianus
gtggaacgcttatgatgcattctcc

SEQ ID NO: 189019 - DNA, 25 bp, Saccharomyces pastorianus
agtctgttactagtcctgacagtag

SEQ ID NO: 189020 - DNA, 25 bp, Saccharomyces pastorianus
gttactagtcctgacagtagatgtc

SEQ ID NO: 189021 - DNA, 25 bp, Saccharomyces pastorianus
ctttcagtggtagtctgttactagt

SEQ ID NO: 189022 - DNA, 25 bp, Saccharomyces pastorianus
gctgtcctcatcacctgctgcgata

SEQ ID NO: 189023 - DNA, 25 bp, Saccharomyces pastorianus
gtctggcagctggtagtagcattag

SEQ ID NO: 189024 - DNA, 25 bp, Saccharomyces pastorianus
ggtagtctgttactagtcctgacag

SEQ ID NO: 189025 - DNA, 25 bp, Saccharomyces pastorianus
tcctgacagtagatgtctggcagct

SEQ ID NO: 189026 - DNA, 25 bp, Saccharomyces pastorianus
agtggtagtctgttactagtcctga

SEQ ID NO: 189027 - DNA, 25 bp, Saccharomyces pastorianus
tcatcacctgctgcgatactttctg

SEQ ID NO: 189028 - DNA, 25 bp, Saccharomyces pastorianus
tcacctgctgcgatactttctgcac

SEQ ID NO: 189029 - DNA, 25 bp, Saccharomyces pastorianus
agatgtctggcagctggtagtagca

SEQ ID NO: 189030 - DNA, 25 bp, Saccharomyces pastorianus
caagctaatcaaatccgatgtagtg

SEQ ID NO: 189031 - DNA, 25 bp, Saccharomyces pastorianus
aatcaagctaatcaaatccgatgta

SEQ ID NO: 189032 - DNA, 25 bp, Saccharomyces pastorianus
gctaatcaaatccgatgtagtgtaa

SEQ ID NO: 189033 - DNA, 25 bp, Saccharomyces pastorianus
tcaagctaatcaaatccgatgtagt

SEQ ID NO: 189034 - DNA, 25 bp, Saccharomyces pastorianus
ctaatcaaatccgatgtagtgtaac

SEQ ID NO: 189035 - DNA, 25 bp, Saccharomyces pastorianus
taatcaaatccgatgtagtgtaacg

SEQ ID NO: 189036 - DNA, 25 bp, Saccharomyces pastorianus
agctaatcaaatccgatgtagtgta

SEQ ID NO: 189037 - DNA, 25 bp, Saccharomyces pastorianus
caaatccgatgtagtgtaacggcta

SEQ ID NO: 189038 - DNA, 25 bp, Saccharomyces pastorianus
atcaagctaatcaaatccgatgtag

SEQ ID NO: 189039 - DNA, 25 bp, Saccharomyces pastorianus
aagctaatcaaatccgatgtagtgt

SEQ ID NO: 189040 - DNA, 25 bp, Saccharomyces pastorianus
aatcaaatccgatgtagtgtaacgg

SEQ ID NO: 189041 - DNA, 25 bp, Saccharomyces pastorianus
ctgactttgtttccggcgcacctat

SEQ ID NO: 189042 - DNA, 25 bp, Saccharomyces pastorianus
tactttcactgactttgtttccggc

SEQ ID NO: 189043 - DNA, 25 bp, Saccharomyces pastorianus
gtactttcactgactttgtttccgg

SEQ ID NO: 189044 - DNA, 25 bp, Saccharomyces pastorianus
tttcactgactttgtttccggcgca

SEQ ID NO: 189045 - DNA, 25 bp, Saccharomyces pastorianus
cggcgcacctattgtaaggagtctt

SEQ ID NO: 189046 - DNA, 25 bp, Saccharomyces pastorianus
ttcactgactttgtttccggcgcac

SEQ ID NO: 189047 - DNA, 25 bp, Saccharomyces pastorianus
actttcactgactttgtttccggcg

SEQ ID NO: 189048 - DNA, 25 bp, Saccharomyces pastorianus
gtttccggcgcacctattgtaagga

SEQ ID NO: 189049 - DNA, 25 bp, Saccharomyces pastorianus
cgtactttcactgactttgtttccg

SEQ ID NO: 189050 - DNA, 25 bp, Saccharomyces pastorianus
aaagttgtcatttccgtcatggtcg

SEQ ID NO: 189051 - DNA, 25 bp, Saccharomyces pastorianus
actgactttgtttccggcgcaccta

SEQ ID NO: 189052 - DNA, 25 bp, Saccharomyces pastorianus
ataacactatgtagaactatcgatt

SEQ ID NO: 189053 - DNA, 25 bp, Saccharomyces pastorianus
tatgtagaactatcgattccctttt

SEQ ID NO: 189054 - DNA, 25 bp, Saccharomyces pastorianus
agaactatcgattcccttttgtgga

SEQ ID NO: 189055 - DNA, 25 bp, Saccharomyces pastorianus
taacactatgtagaactatcgattc

SEQ ID NO: 189056 - DNA, 25 bp, Saccharomyces pastorianus
aacactatgtagaactatcgattcc

SEQ ID NO: 189057 - DNA, 25 bp, Saccharomyces pastorianus
atgtagaactatcgattcccttttg

SEQ ID NO: 189058 - DNA, 25 bp, Saccharomyces pastorianus
tagaactatcgattcccttttgtgg

SEQ ID NO: 189059 - DNA, 25 bp, Saccharomyces pastorianus
actatgtagaactatcgattccctt

SEQ ID NO: 189060 - DNA, 25 bp, Saccharomyces pastorianus
acactatgtagaactatcgattccc

SEQ ID NO: 189061 - DNA, 25 bp, Saccharomyces pastorianus
cactatgtagaactatcgattccct

SEQ ID NO: 189062 - DNA, 25 bp, Saccharomyces pastorianus
ctatgtagaactatcgattcccttt

SEQ ID NO: 189063 - DNA, 25 bp, Saccharomyces pastorianus
atgccagtaccaatgcgagtaccaa

SEQ ID NO: 189064 - DNA, 25 bp, Saccharomyces pastorianus
gtaccaatgcgagtaccaactccag

SEQ ID NO: 189065 - DNA, 25 bp, Saccharomyces pastorianus
agtaccaatgcgagtaccaactcca

SEQ ID NO: 189066 - DNA, 25 bp, Saccharomyces pastorianus
taccaatgcgagtaccaactccagc

SEQ ID NO: 189067 - DNA, 25 bp, Saccharomyces pastorianus
gctaatgccagtaccaatgcgagta

SEQ ID NO: 189068 - DNA, 25 bp, Saccharomyces pastorianus
ctaatgccagtaccaatgcgagtac

SEQ ID NO: 189069 - DNA, 25 bp, Saccharomyces pastorianus
gccagtaccaatgcgagtaccaact

SEQ ID NO: 189070 - DNA, 25 bp, Saccharomyces pastorianus
tgccagtaccaatgcgagtaccaac

SEQ ID NO: 189071 - DNA, 25 bp, Saccharomyces pastorianus
taatgccagtaccaatgcgagtacc

SEQ ID NO: 189072 - DNA, 25 bp, Saccharomyces pastorianus
tgctaatgccagtaccaatgcgagt

SEQ ID NO: 189073 - DNA, 25 bp, Saccharomyces pastorianus
aatgccagtaccaatgcgagtacca

SEQ ID NO: 189074 - DNA, 25 bp, Saccharomyces pastorianus
atattctcggtgatccatctattga

SEQ ID NO: 189075 - DNA, 25 bp, Saccharomyces pastorianus
tgggtgttacgctttggactctaaa

SEQ ID NO: 189076 - DNA, 25 bp, Saccharomyces pastorianus
aaggccttaggctacgtcgcaattc

SEQ ID NO: 189077 - DNA, 25 bp, Saccharomyces pastorianus
cccacagcttgcttctgcagagaag

SEQ ID NO: 189078 - DNA, 25 bp, Saccharomyces pastorianus
actaaggcacttgatttcgttgcaa

SEQ ID NO: 189079 - DNA, 25 bp, Saccharomyces pastorianus
gaaatcacttattccttcaactaag

SEQ ID NO: 189080 - DNA, 25 bp, Saccharomyces pastorianus
aaaattctctgcagaatccctccaa

SEQ ID NO: 189081 - DNA, 25 bp, Saccharomyces pastorianus
gaacctaatgaataccttgacttga

SEQ ID NO: 189082 - DNA, 25 bp, Saccharomyces pastorianus
gttgacaatgcctccaaaaatgatg

SEQ ID NO: 189083 - DNA, 25 bp, Saccharomyces pastorianus
gaatagccactacaccttctaaaga

SEQ ID NO: 189084 - DNA, 25 bp, Saccharomyces pastorianus
aaatgccgcattacttgatcttgtg

SEQ ID NO: 189085 - DNA, 25 bp, Saccharomyces pastorianus
atagttttgaaatgtgcggtttgaa

SEQ ID NO: 189086 - DNA, 25 bp, Saccharomyces pastorianus
gcgacgacactgacaagcctttgaa

SEQ ID NO: 189087 - DNA, 25 bp, Saccharomyces pastorianus
cagacgttccataacatcgcacggg

SEQ ID NO: 189088 - DNA, 25 bp, Saccharomyces pastorianus
acgacccgatgctgttgtaaatgtg

SEQ ID NO: 189089 - DNA, 25 bp, Saccharomyces pastorianus
ttatggaacaacgacccgatgctgt

SEQ ID NO: 189090 - DNA, 25 bp, Saccharomyces pastorianus
gcctttgaacttagatgctatgact

SEQ ID NO: 189091 - DNA, 25 bp, Saccharomyces pastorianus
aagtgtagcaattagttttgtcaaa

SEQ ID NO: 189092 - DNA, 25 bp, Saccharomyces pastorianus
atgactacaaaggacactggagttt

SEQ ID NO: 189093 - DNA, 25 bp, Saccharomyces pastorianus
gcggtttgaaaaatacactgactac

SEQ ID NO: 189094 - DNA, 25 bp, Saccharomyces pastorianus
acactgactacttcaattatggaac

SEQ ID NO: 189095 - DNA, 25 bp, Saccharomyces pastorianus
agtgttggaatacacgtcagacgtt

SEQ ID NO: 189096 - DNA, 25 bp, Saccharomyces pastorianus
gagagaccgccaaattggtgtggaa

SEQ ID NO: 189097 - DNA, 25 bp, Saccharomyces pastorianus
gttgaatgagagaccgccaaattgg

SEQ ID NO: 189098 - DNA, 25 bp, Saccharomyces pastorianus
gctaagtgatctattcttcggtaaa

SEQ ID NO: 189099 - DNA, 25 bp, Saccharomyces pastorianus
agtgatctattcttcggtaaaaccg

SEQ ID NO: 189100 - DNA, 25 bp, Saccharomyces pastorianus
tctattcttcggtaaaaccgacgag

SEQ ID NO: 189101 - DNA, 25 bp, Saccharomyces pastorianus
caaattggtgtggaagagacgaact

SEQ ID NO: 189102 - DNA, 25 bp, Saccharomyces pastorianus
tgtgaagttgaatgagagaccgcca

SEQ ID NO: 189103 - DNA, 25 bp, Saccharomyces pastorianus
gtacggatgttaatgattggatcaa

SEQ ID NO: 189104 - DNA, 25 bp, Saccharomyces pastorianus
gacgaacttgaaactctaatgggta

SEQ ID NO: 189105 - DNA, 25 bp, Saccharomyces pastorianus
aactctaatgggtagtacggatgtt

SEQ ID NO: 189106 - DNA, 25 bp, Saccharomyces pastorianus
tcaagctaagtgatctattcttcgg

SEQ ID NO: 189107 - DNA, 25 bp, Saccharomyces pastorianus
ttcctactactacttttcctagact

SEQ ID NO: 189108 - DNA, 25 bp, Saccharomyces pastorianus
gagtgcgtggagttactgacctcaa

SEQ ID NO: 189109 - DNA, 25 bp, Saccharomyces pastorianus
aagtaacccaagtagcgatgtgcgc

SEQ ID NO: 189110 - DNA, 25 bp, Saccharomyces pastorianus
aaacgttaacgcttcgatggcaggg

SEQ ID NO: 189111 - DNA, 25 bp, Saccharomyces pastorianus
gcttctttcatttttggtggcgcag

SEQ ID NO: 189112 - DNA, 25 bp, Saccharomyces pastorianus
atccttctgcgtcggtgatacattt

SEQ ID NO: 189113 - DNA, 25 bp, Saccharomyces pastorianus
aaaccctcttccactaggattggcg

SEQ ID NO: 189114 - DNA, 25 bp, Saccharomyces pastorianus
atacttgggttttacctggctggat

SEQ ID NO: 189115 - DNA, 25 bp, Saccharomyces pastorianus
gcgtccttctcgttcatgtgtttaa

SEQ ID NO: 189116 - DNA, 25 bp, Saccharomyces pastorianus
ggcgcagttgttttgttgtcaggac

SEQ ID NO: 189117 - DNA, 25 bp, Saccharomyces pastorianus
gtgcgtcggttcttttacatcaaac

SEQ ID NO: 189118 - DNA, 25 bp, Saccharomyces pastorianus
aatcacaacaacaacaatcacaaca

SEQ ID NO: 189119 - DNA, 25 bp, Saccharomyces pastorianus
tcacaatcacaacaacaacaatcac

SEQ ID NO: 189120 - DNA, 25 bp, Saccharomyces pastorianus
cacaatcacaacaacaacaatcaca

SEQ ID NO: 189121 - DNA, 25 bp, Saccharomyces pastorianus
acctcaatcacaatcacaacaacaa

SEQ ID NO: 189122 - DNA, 25 bp, Saccharomyces pastorianus
aacctcaatcacaatcacaacaaca

SEQ ID NO: 189123 - DNA, 25 bp, Saccharomyces pastorianus
cctcaatcacaatcacaacaacaac

SEQ ID NO: 189124 - DNA, 25 bp, Saccharomyces pastorianus
aatcacaatcacaacaacaacaatc

SEQ ID NO: 189125 - DNA, 25 bp, Saccharomyces pastorianus
tcaatcacaatcacaacaacaacaa

SEQ ID NO: 189126 - DNA, 25 bp, Saccharomyces pastorianus
ctcaatcacaatcacaacaacaaca

SEQ ID NO: 189127 - DNA, 25 bp, Saccharomyces pastorianus
caatcacaatcacaacaacaacaat

SEQ ID NO: 189128 - DNA, 25 bp, Saccharomyces pastorianus
atcacaatcacaacaacaacaatca

SEQ ID NO: 189129 - DNA, 25 bp, Saccharomyces pastorianus
taagttcttgcccacattgagtaat

SEQ ID NO: 189130 - DNA, 25 bp, Saccharomyces pastorianus
agatagttctgatcctgaaggtcca

SEQ ID NO: 189131 - DNA, 25 bp, Saccharomyces pastorianus
ggcgttgttattatgcaaagctctg

SEQ ID NO: 189132 - DNA, 25 bp, Saccharomyces pastorianus
gagtaatggtgctttcgatgacgaa

SEQ ID NO: 189133 - DNA, 25 bp, Saccharomyces pastorianus
gtgcttccgacgtccataagaaatt

SEQ ID NO: 189134 - DNA, 25 bp, Saccharomyces pastorianus
gttccaacctatacatctggccaat

SEQ ID NO: 189135 - DNA, 25 bp, Saccharomyces pastorianus
gaattatcccgtaagttcttgccca

SEQ ID NO: 189136 - DNA, 25 bp, Saccharomyces pastorianus
aggtccagctgaagcgttttttcaa

SEQ ID NO: 189137 - DNA, 25 bp, Saccharomyces pastorianus
ggaagtagccaagcacagctgtgta

SEQ ID NO: 189138 - DNA, 25 bp, Saccharomyces pastorianus
aagatataggtgcttccgacgtcca

SEQ ID NO: 189139 - DNA, 25 bp, Saccharomyces pastorianus
gatgctttaaatcctaatggcgttg

SEQ ID NO: 189140 - DNA, 25 bp, Saccharomyces pastorianus
agtggtaccaattgtgattcagatc

SEQ ID NO: 189141 - DNA, 25 bp, Saccharomyces pastorianus
cagaatggagtgtacgcaattgttt

SEQ ID NO: 189142 - DNA, 25 bp, Saccharomyces pastorianus
cggtcaaaactctacctaatttcag

SEQ ID NO: 189143 - DNA, 25 bp, Saccharomyces pastorianus
gatactcgaccctgcaaagatactt

SEQ ID NO: 189144 - DNA, 25 bp, Saccharomyces pastorianus
tcagtattgcaagtggtagtaccca

SEQ ID NO: 189145 - DNA, 25 bp, Saccharomyces pastorianus
atttggcatgaatacctttgtgaaa

SEQ ID NO: 189146 - DNA, 25 bp, Saccharomyces pastorianus
gacacccaacctgctataagaacta

SEQ ID NO: 189147 - DNA, 25 bp, Saccharomyces pastorianus
aaaggatggatactcgaccctgcaa

SEQ ID NO: 189148 - DNA, 25 bp, Saccharomyces pastorianus
gaagcacaagacacctcaaatcaga

SEQ ID NO: 189149 - DNA, 25 bp, Saccharomyces pastorianus
gattcagatcgtcaacgacacccaa

SEQ ID NO: 189150 - DNA, 25 bp, Saccharomyces pastorianus
gagagtttcgccattctaattaaaa

SEQ ID NO: 189151 - DNA, 25 bp, Saccharomyces pastorianus
ctgccgccaatttgaatttcttcca

SEQ ID NO: 189152 - DNA, 25 bp, Saccharomyces pastorianus
gctagtgagaatctgccccgatgaa

SEQ ID NO: 189153 - DNA, 25 bp, Saccharomyces pastorianus
actgtgtggtatgttgtctctaatc

SEQ ID NO: 189154 - DNA, 25 bp, Saccharomyces pastorianus
atcaatgtggataaccgcggtactg

SEQ ID NO: 189155 - DNA, 25 bp, Saccharomyces pastorianus
cagtgaaggtatttccggctgcttt

SEQ ID NO: 189156 - DNA, 25 bp, Saccharomyces pastorianus
catggcgatcattggcagctgtcaa

SEQ ID NO: 189157 - DNA, 25 bp, Saccharomyces pastorianus
acgtatttggactcgagttcctcag

SEQ ID NO: 189158 - DNA, 25 bp, Saccharomyces pastorianus
ttcactttgcatttttacgggccag

SEQ ID NO: 189159 - DNA, 25 bp, Saccharomyces pastorianus
ttccggctgctttcgttcaaagatt

SEQ ID NO: 189160 - DNA, 25 bp, Saccharomyces pastorianus
tacgggccagagttattcttcaaga

SEQ ID NO: 189161 - DNA, 25 bp, Saccharomyces pastorianus
ttattttctcacgatcatggcgatc

SEQ ID NO: 189162 - DNA, 25 bp, Saccharomyces pastorianus
tcaagtatggttcctctgcttctaa

SEQ ID NO: 189163 - DNA, 25 bp, Saccharomyces pastorianus
tgtcaagactgtaacctctgaggct

SEQ ID NO: 189164 - DNA, 25 bp, Saccharomyces pastorianus
gaaactgtctcttcaaagtcgtaca

SEQ ID NO: 189165 - DNA, 25 bp, Saccharomyces pastorianus
actggttccgaagcatctagttcaa

SEQ ID NO: 189166 - DNA, 25 bp, Saccharomyces pastorianus
tcactgtgaggacaacgcctgtagt

SEQ ID NO: 189167 - DNA, 25 bp, Saccharomyces pastorianus
tgaggctcctaaagtaacttccgcc

SEQ ID NO: 189168 - DNA, 25 bp, Saccharomyces pastorianus
tgtcacgtctgaagctccagtatct

SEQ ID NO: 189169 - DNA, 25 bp, Saccharomyces pastorianus
aacggatgtcatgttgttccagccc

SEQ ID NO: 189170 - DNA, 25 bp, Saccharomyces pastorianus
tctgaagctcctaaaccaactaccg

SEQ ID NO: 189171 - DNA, 25 bp, Saccharomyces pastorianus
ctgcttctaaaaccctcactggtgt

SEQ ID NO: 189172 - DNA, 25 bp, Saccharomyces pastorianus
aagtcgtacaccactttcactgtta

SEQ ID NO: 189173 - DNA, 25 bp, Saccharomyces pastorianus
taatctaccagtgaccaatcctagc

SEQ ID NO: 189174 - DNA, 25 bp, Saccharomyces pastorianus
aagtcggatgacgttatcgtgaata

SEQ ID NO: 189175 - DNA, 25 bp, Saccharomyces pastorianus
tctatctcgagacaaggaagtatct

SEQ ID NO: 189176 - DNA, 25 bp, Saccharomyces pastorianus
tgtggcgattctatctcgagacaag

SEQ ID NO: 189177 - DNA, 25 bp, Saccharomyces pastorianus
ccaatcctagcggtttaagagagtc

SEQ ID NO: 189178 - DNA, 25 bp, Saccharomyces pastorianus
accagtgaccaatcctagcggttta

SEQ ID NO: 189179 - DNA, 25 bp, Saccharomyces pastorianus
cctagcggtttaagagagtctatta

SEQ ID NO: 189180 - DNA, 25 bp, Saccharomyces pastorianus
ggcgattctatctcgagacaaggaa

SEQ ID NO: 189181 - DNA, 25 bp, Saccharomyces pastorianus
agttgtggcgattctatctcgagac

SEQ ID NO: 189182 - DNA, 25 bp, Saccharomyces pastorianus
cggatgacgttatcgtgaataattc

SEQ ID NO: 189183 - DNA, 25 bp, Saccharomyces pastorianus
gagtagtagtagttgtggcgattct

SEQ ID NO: 189184 - DNA, 25 bp, Saccharomyces pastorianus
gttcttctacgttcttatttggcca

SEQ ID NO: 189185 - DNA, 25 bp, Saccharomyces pastorianus
cagttggtctttgtcaggtaatgta

SEQ ID NO: 189186 - DNA, 25 bp, Saccharomyces pastorianus
ttggccagtgtttctcaagatcgca

SEQ ID NO: 189187 - DNA, 25 bp, Saccharomyces pastorianus
acttatgttctggaaagcaccttag

SEQ ID NO: 189188 - DNA, 25 bp, Saccharomyces pastorianus
aaagaatctcgcaagtttgttactg

SEQ ID NO: 189189 - DNA, 25 bp, Saccharomyces pastorianus
gtacaattcagatgcccaaacttat

SEQ ID NO: 189190 - DNA, 25 bp, Saccharomyces pastorianus
agctctttccggtggcgataataaa

SEQ ID NO: 189191 - DNA, 25 bp, Saccharomyces pastorianus
aggtaatgtactagctctttccggt

SEQ ID NO: 189192 - DNA, 25 bp, Saccharomyces pastorianus
cttagaaggtcacagcgattgggtt

SEQ ID NO: 189193 - DNA, 25 bp, Saccharomyces pastorianus
agcatggtcacctactgttcttcta

SEQ ID NO: 189194 - DNA, 25 bp, Saccharomyces pastorianus
tcgcacctgtattatttggactcaa

SEQ ID NO: 189195 - DNA, 25 bp, Saccharomyces pastorianus
acacaattgacagccgaatacgagg

SEQ ID NO: 189196 - DNA, 25 bp, Saccharomyces pastorianus
gtctgaagaagatgtcacacaattg

SEQ ID NO: 189197 - DNA, 25 bp, Saccharomyces pastorianus
acgaggctattgatgtcttccggtt

SEQ ID NO: 189198 - DNA, 25 bp, Saccharomyces pastorianus
attgacagccgaatacgaggctatt

SEQ ID NO: 189199 - DNA, 25 bp, Saccharomyces pastorianus
agccgaatacgaggctattgatgtc

SEQ ID NO: 189200 - DNA, 25 bp, Saccharomyces pastorianus
tcacacaattgacagccgaatacga

SEQ ID NO: 189201 - DNA, 25 bp, Saccharomyces pastorianus
aaaggtgtctgaagaagatgtcaca

SEQ ID NO: 189202 - DNA, 25 bp, Saccharomyces pastorianus
ggctattgatgtcttccggttcaac

SEQ ID NO: 189203 - DNA, 25 bp, Saccharomyces pastorianus
aatacgaggctattgatgtcttccg

SEQ ID NO: 189204 - DNA, 25 bp, Saccharomyces pastorianus
gatgtcacacaattgacagccgaat

SEQ ID NO: 189205 - DNA, 25 bp, Saccharomyces pastorianus
gaggctattgatgtcttccggttca

SEQ ID NO: 189206 - DNA, 25 bp, Saccharomyces pastorianus
gttaccaaacacaagagttccgcat

SEQ ID NO: 189207 - DNA, 25 bp, Saccharomyces pastorianus
gctcaggaggttttactttcggcga

SEQ ID NO: 189208 - DNA, 25 bp, Saccharomyces pastorianus
acacgtatgtaacggcccatgccta

SEQ ID NO: 189209 - DNA, 25 bp, Saccharomyces pastorianus
gcaaactgctaccacacgtatgtaa

SEQ ID NO: 189210 - DNA, 25 bp, Saccharomyces pastorianus
ctctgatttgttgggccctctatat

SEQ ID NO: 189211 - DNA, 25 bp, Saccharomyces pastorianus
aatttgttacggctctgatttgttg

SEQ ID NO: 189212 - DNA, 25 bp, Saccharomyces pastorianus
gatggcttcagatcaattttctaca

SEQ ID NO: 189213 - DNA, 25 bp, Saccharomyces pastorianus
actccaactctggtgacctacaaag

SEQ ID NO: 189214 - DNA, 25 bp, Saccharomyces pastorianus
aattttctacattcttaggaccaga

SEQ ID NO: 189215 - DNA, 25 bp, Saccharomyces pastorianus
gcgaccgttacacctgcagagatga

SEQ ID NO: 189216 - DNA, 25 bp, Saccharomyces pastorianus
gaactgttatttgactccaactctg

SEQ ID NO: 189217 - DNA, 25 bp, Saccharomyces pastorianus
ttttctgttgatgaggctcgggaat

SEQ ID NO: 189218 - DNA, 25 bp, Saccharomyces pastorianus
tgaggctcgggaattaactgatgaa

SEQ ID NO: 189219 - DNA, 25 bp, Saccharomyces pastorianus
ttctgttgatgaggctcgggaatta

SEQ ID NO: 189220 - DNA, 25 bp, Saccharomyces pastorianus
acttgcaatcctttcaatttttctg

SEQ ID NO: 189221 - DNA, 25 bp, Saccharomyces pastorianus
tgcaatcctttcaatttttctgttg

SEQ ID NO: 189222 - DNA, 25 bp, Saccharomyces pastorianus
gatgaggctcgggaattaactgatg

SEQ ID NO: 189223 - DNA, 25 bp, Saccharomyces pastorianus
cttgcaatcctttcaatttttctgt

SEQ ID NO: 189224 - DNA, 25 bp, Saccharomyces pastorianus
aatttttctgttgatgaggctcggg

SEQ ID NO: 189225 - DNA, 25 bp, Saccharomyces pastorianus
tctactaatacttgcaatcctttca

SEQ ID NO: 189226 - DNA, 25 bp, Saccharomyces pastorianus
atttttctgttgatgaggctcggga

SEQ ID NO: 189227 - DNA, 25 bp, Saccharomyces pastorianus
actaatacttgcaatcctttcaatt

SEQ ID NO: 189228 - DNA, 25 bp, Saccharomyces pastorianus
atctattacattatgggtggtatgt

SEQ ID NO: 189229 - DNA, 25 bp, Saccharomyces pastorianus
ctattacattatgggtggtatgttg

SEQ ID NO: 189230 - DNA, 25 bp, Saccharomyces pastorianus
cattatgggtggtatgttggaataa

SEQ ID NO: 189231 - DNA, 25 bp, Saccharomyces pastorianus
cattagatctattacattatgggtg

SEQ ID NO: 189232 - DNA, 25 bp, Saccharomyces pastorianus
tctattacattatgggtggtatgtt

SEQ ID NO: 189233 - DNA, 25 bp, Saccharomyces pastorianus
ttagatctattacattatgggtggt

SEQ ID NO: 189234 - DNA, 25 bp, Saccharomyces pastorianus
attatgggtggtatgttggaataaa

SEQ ID NO: 189235 - DNA, 25 bp, Saccharomyces pastorianus
tcattagatctattacattatgggt

SEQ ID NO: 189236 - DNA, 25 bp, Saccharomyces pastorianus
gatctattacattatgggtggtatg

SEQ ID NO: 189237 - DNA, 25 bp, Saccharomyces pastorianus
ttcattagatctattacattatggg

SEQ ID NO: 189238 - DNA, 25 bp, Saccharomyces pastorianus
attagatctattacattatgggtgg

SEQ ID NO: 189239 - DNA, 25 bp, Saccharomyces pastorianus
ttagaagttctcctccaggatttag

SEQ ID NO: 189240 - DNA, 25 bp, Saccharomyces pastorianus
gaatccataaaagggaatctgcaat

SEQ ID NO: 189241 - DNA, 25 bp, Saccharomyces pastorianus
atgttagaagttctcctccaggatt

SEQ ID NO: 189242 - DNA, 25 bp, Saccharomyces pastorianus
tccataaaagggaatctgcaattct

SEQ ID NO: 189243 - DNA, 25 bp, Saccharomyces pastorianus
atccataaaagggaatctgcaattc

SEQ ID NO: 189244 - DNA, 25 bp, Saccharomyces pastorianus
tgttagaagttctcctccaggattt

SEQ ID NO: 189245 - DNA, 25 bp, Saccharomyces pastorianus
tctcctccaggatttaggaatccat

SEQ ID NO: 189246 - DNA, 25 bp, Saccharomyces pastorianus
gttagaagttctcctccaggattta

SEQ ID NO: 189247 - DNA, 25 bp, Saccharomyces pastorianus
ccataaaagggaatctgcaattcta

SEQ ID NO: 189248 - DNA, 25 bp, Saccharomyces pastorianus
tcctccaggatttaggaatccataa

SEQ ID NO: 189249 - DNA, 25 bp, Saccharomyces pastorianus
ctcctccaggatttaggaatccata

SEQ ID NO: 189250 - DNA, 25 bp, Saccharomyces pastorianus
tggatacaatttggcaccctacatg

SEQ ID NO: 189251 - DNA, 25 bp, Saccharomyces pastorianus
ggcaccctacatgtttttgttacta

SEQ ID NO: 189252 - DNA, 25 bp, Saccharomyces pastorianus
aaatatggatacaatttggcaccct

SEQ ID NO: 189253 - DNA, 25 bp, Saccharomyces pastorianus
tttctggcacacctattgtaaggag

SEQ ID NO: 189254 - DNA, 25 bp, Saccharomyces pastorianus
atggatacaatttggcaccctacat

SEQ ID NO: 189255 - DNA, 25 bp, Saccharomyces pastorianus
atacaatttggcaccctacatgttt

SEQ ID NO: 189256 - DNA, 25 bp, Saccharomyces pastorianus
aactttgtttctggcacacctattg

SEQ ID NO: 189257 - DNA, 25 bp, Saccharomyces pastorianus
tggcacacctattgtaaggagtctt

SEQ ID NO: 189258 - DNA, 25 bp, Saccharomyces pastorianus
aatatggatacaatttggcacccta

SEQ ID NO: 189259 - DNA, 25 bp, Saccharomyces pastorianus
gtttctggcacacctattgtaagga

SEQ ID NO: 189260 - DNA, 25 bp, Saccharomyces pastorianus
acacctattgtaaggagtcttcaga

SEQ ID NO: 189261 - DNA, 25 bp, Saccharomyces pastorianus
cattatgggtggtatgttggaataa

SEQ ID NO: 189262 - DNA, 25 bp, Saccharomyces pastorianus
tctactaactagtatttacgttact

SEQ ID NO: 189263 - DNA, 25 bp, Saccharomyces pastorianus
ttatgggtggtatgttggaataaaa

SEQ ID NO: 189264 - DNA, 25 bp, Saccharomyces pastorianus
catctactaactagtatttacgtta

SEQ ID NO: 189265 - DNA, 25 bp, Saccharomyces pastorianus
attatgggtggtatgttggaataaa

SEQ ID NO: 189266 - DNA, 25 bp, Saccharomyces pastorianus
tgggtggtatgttggaataaaaatc

SEQ ID NO: 189267 - DNA, 25 bp, Saccharomyces pastorianus
gggtggtatgttggaataaaaatca

SEQ ID NO: 189268 - DNA, 25 bp, Saccharomyces pastorianus
atgggtggtatgttggaataaaaat

SEQ ID NO: 189269 - DNA, 25 bp, Saccharomyces pastorianus
tatgggtggtatgttggaataaaaa

SEQ ID NO: 189270 - DNA, 25 bp, Saccharomyces pastorianus
tcatctactaactagtatttacgtt

SEQ ID NO: 189271 - DNA, 25 bp, Saccharomyces pastorianus
gttggaataaaaatcaactatcatc

SEQ ID NO: 189272 - DNA, 25 bp, Saccharomyces pastorianus
ataaatatggtggtcagccttttgc

SEQ ID NO: 189273 - DNA, 25 bp, Saccharomyces pastorianus
gtctcggttacgctgcatcatacaa

SEQ ID NO: 189274 - DNA, 25 bp, Saccharomyces pastorianus
gtccgcctctgcaggcataatggaa

SEQ ID NO: 189275 - DNA, 25 bp, Saccharomyces pastorianus
ctctggccaggaattgaatcgtgtt

SEQ ID NO: 189276 - DNA, 25 bp, Saccharomyces pastorianus
aaattgccgtcttccatcctgtgga

SEQ ID NO: 189277 - DNA, 25 bp, Saccharomyces pastorianus
catcctgtggacaccatttccaaaa

SEQ ID NO: 189278 - DNA, 25 bp, Saccharomyces pastorianus
gatcatttcagcgaacctttgggca

SEQ ID NO: 189279 - DNA, 25 bp, Saccharomyces pastorianus
gctgcatcatacaaagttcttcaaa

SEQ ID NO: 189280 - DNA, 25 bp, Saccharomyces pastorianus
ttccaaaagactgatgtccaaccac

SEQ ID NO: 189281 - DNA, 25 bp, Saccharomyces pastorianus
gaatcgtgttatttttcgtgatcat

SEQ ID NO: 189282 - DNA, 25 bp, Saccharomyces pastorianus
acaccaaaataacctctggccagga

SEQ ID NO: 189283 - DNA, 25 bp, Saccharomyces pastorianus
gatctgagcgatctcaacgatacta

SEQ ID NO: 189284 - DNA, 25 bp, Saccharomyces pastorianus
agcgcaactggctttgctgttatca

SEQ ID NO: 189285 - DNA, 25 bp, Saccharomyces pastorianus
acttgttgtcatcagagaattcttc

SEQ ID NO: 189286 - DNA, 25 bp, Saccharomyces pastorianus
tttaacaaattcttcaacggtgact

SEQ ID NO: 189287 - DNA, 25 bp, Saccharomyces pastorianus
tctgattttgatgataccgacgtaa

SEQ ID NO: 189288 - DNA, 25 bp, Saccharomyces pastorianus
taacaatgacttactacgggagctt

SEQ ID NO: 189289 - DNA, 25 bp, Saccharomyces pastorianus
agatcccgattccttgacagtttat

SEQ ID NO: 189290 - DNA, 25 bp, Saccharomyces pastorianus
gtcactgtttgttcgttcgaagcaa

SEQ ID NO: 189291 - DNA, 25 bp, Saccharomyces pastorianus
gaacctcaatggctatacttttaca

SEQ ID NO: 189292 - DNA, 25 bp, Saccharomyces pastorianus
gctcagttgtatggatgcattgtca

SEQ ID NO: 189293 - DNA, 25 bp, Saccharomyces pastorianus
acgggagctttcatttgcattcaat

SEQ ID NO: 189294 - DNA, 25 bp, Saccharomyces pastorianus
agcaaaatcatcaacttcgtttaaa

SEQ ID NO: 189295 - DNA, 25 bp, Saccharomyces pastorianus
ttttcccttttagaagcaaaatcat

SEQ ID NO: 189296 - DNA, 25 bp, Saccharomyces pastorianus
ctttattactgtcgccaaaggtgga

SEQ ID NO: 189297 - DNA, 25 bp, Saccharomyces pastorianus
atcatcaacttcgtttaaaccatac

SEQ ID NO: 189298 - DNA, 25 bp, Saccharomyces pastorianus
tcatcatctttattactgtcgccaa

SEQ ID NO: 189299 - DNA, 25 bp, Saccharomyces pastorianus
gtcgccaaaggtggattgtccaagt

SEQ ID NO: 189300 - DNA, 25 bp, Saccharomyces pastorianus
ctgtcgccaaaggtggattgtccaa

SEQ ID NO: 189301 - DNA, 25 bp, Saccharomyces pastorianus
gccaaaggtggattgtccaagtaaa

SEQ ID NO: 189302 - DNA, 25 bp, Saccharomyces pastorianus
tactgtcgccaaaggtggattgtcc

SEQ ID NO: 189303 - DNA, 25 bp, Saccharomyces pastorianus
atctttattactgtcgccaaaggtg

SEQ ID NO: 189304 - DNA, 25 bp, Saccharomyces pastorianus
atcatctttattactgtcgccaaag

SEQ ID NO: 189305 - DNA, 25 bp, Saccharomyces pastorianus
attccacaccatggcccattctcac

SEQ ID NO: 189306 - DNA, 25 bp, Saccharomyces pastorianus
ttcatattccacaccatggcccatt

SEQ ID NO: 189307 - DNA, 25 bp, Saccharomyces pastorianus
gttaccctactttcatattccacac

SEQ ID NO: 189308 - DNA, 25 bp, Saccharomyces pastorianus
tcatattccacaccatggcccattc

SEQ ID NO: 189309 - DNA, 25 bp, Saccharomyces pastorianus
catattccacaccatggcccattct

SEQ ID NO: 189310 - DNA, 25 bp, Saccharomyces pastorianus
acaccatggcccattctcactaaat

SEQ ID NO: 189311 - DNA, 25 bp, Saccharomyces pastorianus
tattccacaccatggcccattctca

SEQ ID NO: 189312 - DNA, 25 bp, Saccharomyces pastorianus
cactctcaagttaccctactttcat

SEQ ID NO: 189313 - DNA, 25 bp, Saccharomyces pastorianus
agttaccctactttcatattccaca

SEQ ID NO: 189314 - DNA, 25 bp, Saccharomyces pastorianus
tccacaccatggcccattctcacta

SEQ ID NO: 189315 - DNA, 25 bp, Saccharomyces pastorianus
atattccacaccatggcccattctc

SEQ ID NO: 189316 - DNA, 25 bp, Saccharomyces pastorianus
gcagtccaggatggttcatcacaag

SEQ ID NO: 189317 - DNA, 25 bp, Saccharomyces pastorianus
aggtcacaattataggctctggtcc

SEQ ID NO: 189318 - DNA, 25 bp, Saccharomyces pastorianus
gatggttcatcacaaggtcacaatt

SEQ ID NO: 189319 - DNA, 25 bp, Saccharomyces pastorianus
acatatctaggtcggttgggcacac

SEQ ID NO: 189320 - DNA, 25 bp, Saccharomyces pastorianus
taggaccactgagaacatatctagg

SEQ ID NO: 189321 - DNA, 25 bp, Saccharomyces pastorianus
atgatagggcatataggaccactga

SEQ ID NO: 189322 - DNA, 25 bp, Saccharomyces pastorianus
cacacgggtgcagtccaggatggtt

SEQ ID NO: 189323 - DNA, 25 bp, Saccharomyces pastorianus
cacaattataggctctggtccagct

SEQ ID NO: 189324 - DNA, 25 bp, Saccharomyces pastorianus
ggtgcagtccaggatggttcatcac

SEQ ID NO: 189325 - DNA, 25 bp, Saccharomyces pastorianus
atatctaggtcggttgggcacacgg

SEQ ID NO: 189326 - DNA, 25 bp, Saccharomyces pastorianus
ggcatataggaccactgagaacata

SEQ ID NO: 189327 - DNA, 25 bp, Saccharomyces pastorianus
tcaagatgccagttcgaccgatttt

SEQ ID NO: 189328 - DNA, 25 bp, Saccharomyces pastorianus
atcaatcggaggactttacctgcgc

SEQ ID NO: 189329 - DNA, 25 bp, Saccharomyces pastorianus
atgccagttcgaccgatttttacgt

SEQ ID NO: 189330 - DNA, 25 bp, Saccharomyces pastorianus
aacgatgttgacatggtcggtgaaa

SEQ ID NO: 189331 - DNA, 25 bp, Saccharomyces pastorianus
ggcttctggccaagtttaacaatca

SEQ ID NO: 189332 - DNA, 25 bp, Saccharomyces pastorianus
ttgagtcattaattgccagttttgg

SEQ ID NO: 189333 - DNA, 25 bp, Saccharomyces pastorianus
agcatcaagcaaggcttctggccaa

SEQ ID NO: 189334 - DNA, 25 bp, Saccharomyces pastorianus
gaagattggccaagaagcatcaagc

SEQ ID NO: 189335 - DNA, 25 bp, Saccharomyces pastorianus
ctttacctgcgcactatgtcaagat

SEQ ID NO: 189336 - DNA, 25 bp, Saccharomyces pastorianus
ctacgccaaggagttaacttacaag

SEQ ID NO: 189337 - DNA, 25 bp, Saccharomyces pastorianus
gccagttttggcaaccaatacgtta

SEQ ID NO: 189338 - DNA, 25 bp, Saccharomyces pastorianus
aacggacaactaaagcgagcgctcg

SEQ ID NO: 189339 - DNA, 25 bp, Saccharomyces pastorianus
gacgatgcagtgttataccctctta

SEQ ID NO: 189340 - DNA, 25 bp, Saccharomyces pastorianus
gcgctcgtcctagtgttgaatgcaa

SEQ ID NO: 189341 - DNA, 25 bp, Saccharomyces pastorianus
ctcgacgactccaatcatcttaatg

SEQ ID NO: 189342 - DNA, 25 bp, Saccharomyces pastorianus
taggcttgcttgatattgtggccaa

SEQ ID NO: 189343 - DNA, 25 bp, Saccharomyces pastorianus
tggtggaatcttgagcattacttct

SEQ ID NO: 189344 - DNA, 25 bp, Saccharomyces pastorianus
ttaacgtagttaccgcggactcgct

SEQ ID NO: 189345 - DNA, 25 bp, Saccharomyces pastorianus
agctgtcgtggttctctaatactgg

SEQ ID NO: 189346 - DNA, 25 bp, Saccharomyces pastorianus
attgactttaccattgccgtttcag

SEQ ID NO: 189347 - DNA, 25 bp, Saccharomyces pastorianus
ttagctacaccaacatccattaacg

SEQ ID NO: 189348 - DNA, 25 bp, Saccharomyces pastorianus
attgtggatctcttatccggcattg

SEQ ID NO: 189349 - DNA, 25 bp, Saccharomyces pastorianus
gatatgttcttataaccctcctgga

SEQ ID NO: 189350 - DNA, 25 bp, Saccharomyces pastorianus
gtgcggctacaagtactgtggtacc

SEQ ID NO: 189351 - DNA, 25 bp, Saccharomyces pastorianus
tgataagcacggtgtcctcttcgtc

SEQ ID NO: 189352 - DNA, 25 bp, Saccharomyces pastorianus
agaacctggcgttgggctataccga

SEQ ID NO: 189353 - DNA, 25 bp, Saccharomyces pastorianus
gaagttaccaccataaatcctgcca

SEQ ID NO: 189354 - DNA, 25 bp, Saccharomyces pastorianus
tggtcagacacgctggccacgtatg

SEQ ID NO: 189355 - DNA, 25 bp, Saccharomyces pastorianus
tggaagtctaccacccaggtcgggt

SEQ ID NO: 189356 - DNA, 25 bp, Saccharomyces pastorianus
cggcggctagttcttctgaagttac

SEQ ID NO: 189357 - DNA, 25 bp, Saccharomyces pastorianus
tgtcgtccagtatggctgctccaaa

SEQ ID NO: 189358 - DNA, 25 bp, Saccharomyces pastorianus
gagtacgattgctcgggcacgctga

SEQ ID NO: 189359 - DNA, 25 bp, Saccharomyces pastorianus
taagtacaactactcgaatcccggg

SEQ ID NO: 189360 - DNA, 25 bp, Saccharomyces pastorianus
gatccgtgacggacgttgcatgtgt

SEQ ID NO: 189361 - DNA, 25 bp, Saccharomyces pastorianus
tattttgttaccgttgcccagcatt

SEQ ID NO: 189362 - DNA, 25 bp, Saccharomyces pastorianus
atgcttcttctgctagcggtacaaa

SEQ ID NO: 189363 - DNA, 25 bp, Saccharomyces pastorianus
atagagagctgttgcgatccgtgac

SEQ ID NO: 189364 - DNA, 25 bp, Saccharomyces pastorianus
actgccatagtgtccgctttgtatt

SEQ ID NO: 189365 - DNA, 25 bp, Saccharomyces pastorianus
ctccccaatctaccgactgaaaaag

SEQ ID NO: 189366 - DNA, 25 bp, Saccharomyces pastorianus
gtttccactgagtcgaaggaccttc

SEQ ID NO: 189367 - DNA, 25 bp, Saccharomyces pastorianus
aaaggcagtacgcatgcttcttctg

SEQ ID NO: 189368 - DNA, 25 bp, Saccharomyces pastorianus
aatttttcttcaatgactgccatag

SEQ ID NO: 189369 - DNA, 25 bp, Saccharomyces pastorianus
gcatgtgttcccttttttggtgtat

SEQ ID NO: 189370 - DNA, 25 bp, Saccharomyces pastorianus
gtcggaaacccagattttcttcaca

SEQ ID NO: 189371 - DNA, 25 bp, Saccharomyces pastorianus
aatttggcaccccacatgtttttgt

SEQ ID NO: 189372 - DNA, 25 bp, Saccharomyces pastorianus
ggcaccccacatgtttttgttacta

SEQ ID NO: 189373 - DNA, 25 bp, Saccharomyces pastorianus
ctgactttgtttctggcacacctat

SEQ ID NO: 189374 - DNA, 25 bp, Saccharomyces pastorianus
tggcaccccacatgtttttgttact

SEQ ID NO: 189375 - DNA, 25 bp, Saccharomyces pastorianus
atttggcaccccacatgtttttgtt

SEQ ID NO: 189376 - DNA, 25 bp, Saccharomyces pastorianus
ttcactgactttgtttctggcacac

SEQ ID NO: 189377 - DNA, 25 bp, Saccharomyces pastorianus
gtacaatttggcaccccacatgttt

SEQ ID NO: 189378 - DNA, 25 bp, Saccharomyces pastorianus
actttcactgactttgtttctggca

SEQ ID NO: 189379 - DNA, 25 bp, Saccharomyces pastorianus
ttggcaccccacatgtttttgttac

SEQ ID NO: 189380 - DNA, 25 bp, Saccharomyces pastorianus
gtttctggcacacctattgtaagga

SEQ ID NO: 189381 - DNA, 25 bp, Saccharomyces pastorianus
tttggcaccccacatgtttttgtta

SEQ ID NO: 189382 - DNA, 25 bp, Saccharomyces pastorianus
aatgtgatggtagtctaccctgctt

SEQ ID NO: 189383 - DNA, 25 bp, Saccharomyces pastorianus
tggtagtctaccctgcttttcgtgc

SEQ ID NO: 189384 - DNA, 25 bp, Saccharomyces pastorianus
aagatgatcatattctagagcagat

SEQ ID NO: 189385 - DNA, 25 bp, Saccharomyces pastorianus
ctcagcttttacaagcaagatgatc

SEQ ID NO: 189386 - DNA, 25 bp, Saccharomyces pastorianus
tgtgatggtagtctaccctgctttt

SEQ ID NO: 189387 - DNA, 25 bp, Saccharomyces pastorianus
taaaatgtgatggtagtctaccctg

SEQ ID NO: 189388 - DNA, 25 bp, Saccharomyces pastorianus
attctagagcagatcaagattctta

SEQ ID NO: 189389 - DNA, 25 bp, Saccharomyces pastorianus
ctgcaggaacaggaaagtaaaatgt

SEQ ID NO: 189390 - DNA, 25 bp, Saccharomyces pastorianus
acttgtacatatatgattaagggtg

SEQ ID NO: 189391 - DNA, 25 bp, Saccharomyces pastorianus
gcaagatgatcatattctagagcag

SEQ ID NO: 189392 - DNA, 25 bp, Saccharomyces pastorianus
gatggtagtctaccctgcttttcgt

SEQ ID NO: 189393 - DNA, 25 bp, Saccharomyces pastorianus
aatttcttcgaatccaagtctttca

SEQ ID NO: 189394 - DNA, 25 bp, Saccharomyces pastorianus
aaattagacaacaccactccttctc

SEQ ID NO: 189395 - DNA, 25 bp, Saccharomyces pastorianus
ttctctagccggtactgccaaaatt

SEQ ID NO: 189396 - DNA, 25 bp, Saccharomyces pastorianus
aaacattgctgtcgttgtcgagcca

SEQ ID NO: 189397 - DNA, 25 bp, Saccharomyces pastorianus
taatccaccaaagaacgtaacctca

SEQ ID NO: 189398 - DNA, 25 bp, Saccharomyces pastorianus
tttcaaaattttcttctcaatctag

SEQ ID NO: 189399 - DNA, 25 bp, Saccharomyces pastorianus
gatacaacaactttcatcaaaccta

SEQ ID NO: 189400 - DNA, 25 bp, Saccharomyces pastorianus
gaagacacagattactataacacat

SEQ ID NO: 189401 - DNA, 25 bp, Saccharomyces pastorianus
gagaacagcacatctactagcacca

SEQ ID NO: 189402 - DNA, 25 bp, Saccharomyces pastorianus
tcatctcttcataactaccttcaaa

SEQ ID NO: 189403 - DNA, 25 bp, Saccharomyces pastorianus
cgagccagctgccatcatcaaaaaa

SEQ ID NO: 189404 - DNA, 25 bp, Saccharomyces pastorianus
cattcctcagaaccagcatatatag

SEQ ID NO: 189405 - DNA, 25 bp, Saccharomyces pastorianus
tggtattcaaccagatatcatcatt

SEQ ID NO: 189406 - DNA, 25 bp, Saccharomyces pastorianus
aatggcctaccattgacatgccctt

SEQ ID NO: 189407 - DNA, 25 bp, Saccharomyces pastorianus
ggatttggctcttaacagaagtcgt

SEQ ID NO: 189408 - DNA, 25 bp, Saccharomyces pastorianus
gttacgatatggatgacgcgatgat

SEQ ID NO: 189409 - DNA, 25 bp, Saccharomyces pastorianus
acggtcaaaagggtgtctgttccag

SEQ ID NO: 189410 - DNA, 25 bp, Saccharomyces pastorianus
tcacgtatgactatcggtatgttcg

SEQ ID NO: 189411 - DNA, 25 bp, Saccharomyces pastorianus
gttgctgtcatttcatacactggtt

SEQ ID NO: 189412 - DNA, 25 bp, Saccharomyces pastorianus
gtctgttccagaaaatggcctacca

SEQ ID NO: 189413 - DNA, 25 bp, Saccharomyces pastorianus
tgacatgcccttcagtgaaactggt

SEQ ID NO: 189414 - DNA, 25 bp, Saccharomyces pastorianus
acgcttttccttcacgtatgactat

SEQ ID NO: 189415 - DNA, 25 bp, Saccharomyces pastorianus
agtggagatcatccgcatttaccct

SEQ ID NO: 189416 - DNA, 25 bp, Saccharomyces pastorianus
tttccccatcttggtatccactaaa

SEQ ID NO: 189417 - DNA, 25 bp, Saccharomyces pastorianus
aatcaacctcttgaatctgctgacc

SEQ ID NO: 189418 - DNA, 25 bp, Saccharomyces pastorianus
cttttgctttgtgccaggtgccgaa

SEQ ID NO: 189419 - DNA, 25 bp, Saccharomyces pastorianus
agttatgtgtcactcatgttccctt

SEQ ID NO: 189420 - DNA, 25 bp, Saccharomyces pastorianus
taggcactttgttcactgcaagccc

SEQ ID NO: 189421 - DNA, 25 bp, Saccharomyces pastorianus
gtagctgtgggaagctcgtcgcaca

SEQ ID NO: 189422 - DNA, 25 bp, Saccharomyces pastorianus
agtgttgattcgtacatttccccat

SEQ ID NO: 189423 - DNA, 25 bp, Saccharomyces pastorianus
aaatgcctcgtcgtttttcaaagtg

SEQ ID NO: 189424 - DNA, 25 bp, Saccharomyces pastorianus
tcgtcgcacatctagcggttcaaaa

SEQ ID NO: 189425 - DNA, 25 bp, Saccharomyces pastorianus
tcctacgtgggactttgcagctgtt

SEQ ID NO: 189426 - DNA, 25 bp, Saccharomyces pastorianus
ttgatctctgtgctctccggtcatt

SEQ ID NO: 189427 - DNA, 25 bp, Saccharomyces pastorianus
agaaatgtttgtgtctggcggcgat

SEQ ID NO: 189428 - DNA, 25 bp, Saccharomyces pastorianus
agacggcaagatttacatttgggat

SEQ ID NO: 189429 - DNA, 25 bp, Saccharomyces pastorianus
gtaacgtggtcgcatcaaatcctgt

SEQ ID NO: 189430 - DNA, 25 bp, Saccharomyces pastorianus
ggtcattccacactgatcaacaact

SEQ ID NO: 189431 - DNA, 25 bp, Saccharomyces pastorianus
agcgggtccgaagacggcaagattt

SEQ ID NO: 189432 - DNA, 25 bp, Saccharomyces pastorianus
gtgaaaaactgtaacgtggtcgcat

SEQ ID NO: 189433 - DNA, 25 bp, Saccharomyces pastorianus
aggtaatttgatctctgtgctctcc

SEQ ID NO: 189434 - DNA, 25 bp, Saccharomyces pastorianus
gatcaacaactcctcaaaacccgtt

SEQ ID NO: 189435 - DNA, 25 bp, Saccharomyces pastorianus
aatgtttgtgtctggcggcgatgac

SEQ ID NO: 189436 - DNA, 25 bp, Saccharomyces pastorianus
acgtggtcgcatcaaatcctgtcga

SEQ ID NO: 189437 - DNA, 25 bp, Saccharomyces pastorianus
ggccgacacagagcggcttgaagcg

SEQ ID NO: 189438 - DNA, 25 bp, Saccharomyces pastorianus
gaggccgacacagagcggcttgaag

SEQ ID NO: 189439 - DNA, 25 bp, Saccharomyces pastorianus
tggcgaaaagaggccgacacagagc

SEQ ID NO: 189440 - DNA, 25 bp, Saccharomyces pastorianus
agaggccgacacagagcggcttgaa

SEQ ID NO: 189441 - DNA, 25 bp, Saccharomyces pastorianus
aggccgacacagagcggcttgaagc

SEQ ID NO: 189442 - DNA, 25 bp, Saccharomyces pastorianus
tacctggcgaaaagaggccgacaca

SEQ ID NO: 189443 - DNA, 25 bp, Saccharomyces pastorianus
aaaagaggccgacacagagcggctt

SEQ ID NO: 189444 - DNA, 25 bp, Saccharomyces pastorianus
aaagaggccgacacagagcggcttg

SEQ ID NO: 189445 - DNA, 25 bp, Saccharomyces pastorianus
gaaaagaggccgacacagagcggct

SEQ ID NO: 189446 - DNA, 25 bp, Saccharomyces pastorianus
aagaggccgacacagagcggcttga

SEQ ID NO: 189447 - DNA, 25 bp, Saccharomyces pastorianus
gatgaattccagcagtgttgccgat

SEQ ID NO: 189448 - DNA, 25 bp, Saccharomyces pastorianus
aaacttggctcgtctggatgattca

SEQ ID NO: 189449 - DNA, 25 bp, Saccharomyces pastorianus
acatacgttgctcaaacttggctcg

SEQ ID NO: 189450 - DNA, 25 bp, Saccharomyces pastorianus
gaagaaccttcatttgtcccagtta

SEQ ID NO: 189451 - DNA, 25 bp, Saccharomyces pastorianus
acagttagtatcatgatggcccata

SEQ ID NO: 189452 - DNA, 25 bp, Saccharomyces pastorianus
acaagggtcctttatattggtctat

SEQ ID NO: 189453 - DNA, 25 bp, Saccharomyces pastorianus
gacgcacaatggcaccaagtagtag

SEQ ID NO: 189454 - DNA, 25 bp, Saccharomyces pastorianus
acacacgattgatgagggacgagaa

SEQ ID NO: 189455 - DNA, 25 bp, Saccharomyces pastorianus
gtagacttacttgcttttcaaacaa

SEQ ID NO: 189456 - DNA, 25 bp, Saccharomyces pastorianus
gatgacagtatatctcttcaaagtg

SEQ ID NO: 189457 - DNA, 25 bp, Saccharomyces pastorianus
ggatgattcaggtatctcctttttt

SEQ ID NO: 189458 - DNA, 25 bp, Saccharomyces pastorianus
ggattacactcacagaatagctctt

SEQ ID NO: 189459 - DNA, 25 bp, Saccharomyces pastorianus
aatagcaatagtagtgtttccacca

SEQ ID NO: 189460 - DNA, 25 bp, Saccharomyces pastorianus
gaaagcaatctttacttatgttgat

SEQ ID NO: 189461 - DNA, 25 bp, Saccharomyces pastorianus
aattgaattggctctgcaaattgtg

SEQ ID NO: 189462 - DNA, 25 bp, Saccharomyces pastorianus
gtgtttccaccagcaatagtaccaa

SEQ ID NO: 189463 - DNA, 25 bp, Saccharomyces pastorianus
gcagtgattcatctccatctaataa

SEQ ID NO: 189464 - DNA, 25 bp, Saccharomyces pastorianus
aataacgcaggattacactcacaga

SEQ ID NO: 189465 - DNA, 25 bp, Saccharomyces pastorianus
ggattgttggcagtgattcatctcc

SEQ ID NO: 189466 - DNA, 25 bp, Saccharomyces pastorianus
gtaccaatgacattctgcacttaaa

SEQ ID NO: 189467 - DNA, 25 bp, Saccharomyces pastorianus
aagtataccggtgagaaagcaatct

SEQ ID NO: 189468 - DNA, 25 bp, Saccharomyces pastorianus
tcatctaaacctggaccggttttgg

SEQ ID NO: 189469 - DNA, 25 bp, Saccharomyces pastorianus
accaactttgtttctggcacaccta

SEQ ID NO: 189470 - DNA, 25 bp, Saccharomyces pastorianus
tttcaccaactttgtttctggcaca

SEQ ID NO: 189471 - DNA, 25 bp, Saccharomyces pastorianus
ctttcaccaactttgtttctggcac

SEQ ID NO: 189472 - DNA, 25 bp, Saccharomyces pastorianus
agtgccaggccgaacgacagctctc

SEQ ID NO: 189473 - DNA, 25 bp, Saccharomyces pastorianus
ccaactttgtttctggcacacctat

SEQ ID NO: 189474 - DNA, 25 bp, Saccharomyces pastorianus
ctttgtttctggcacacctattgta

SEQ ID NO: 189475 - DNA, 25 bp, Saccharomyces pastorianus
tcaccaactttgtttctggcacacc

SEQ ID NO: 189476 - DNA, 25 bp, Saccharomyces pastorianus
caactttgtttctggcacacctatt

SEQ ID NO: 189477 - DNA, 25 bp, Saccharomyces pastorianus
aactttgtttctggcacacctattg

SEQ ID NO: 189478 - DNA, 25 bp, Saccharomyces pastorianus
ttcaccaactttgtttctggcacac

SEQ ID NO: 189479 - DNA, 25 bp, Saccharomyces pastorianus
caccaactttgtttctggcacacct

SEQ ID NO: 189480 - DNA, 25 bp, Saccharomyces pastorianus
tttcgagtcgtcttcaatagcactt

SEQ ID NO: 189481 - DNA, 25 bp, Saccharomyces pastorianus
acttcccctttatcgttgactatat

SEQ ID NO: 189482 - DNA, 25 bp, Saccharomyces pastorianus
gtttgttctctctggctttcaaaac

SEQ ID NO: 189483 - DNA, 25 bp, Saccharomyces pastorianus
tcgatattcacgacgtcttcgttgg

SEQ ID NO: 189484 - DNA, 25 bp, Saccharomyces pastorianus
gaataactgggcaaacccttgtttg

SEQ ID NO: 189485 - DNA, 25 bp, Saccharomyces pastorianus
tttagcgctttgattagtgcacttg

SEQ ID NO: 189486 - DNA, 25 bp, Saccharomyces pastorianus
tcttcgttggcttcatcttcttcat

SEQ ID NO: 189487 - DNA, 25 bp, Saccharomyces pastorianus
aatagcactttcttcttcatcaact

SEQ ID NO: 189488 - DNA, 25 bp, Saccharomyces pastorianus
ttcatcaacttcttcaaactctcct

SEQ ID NO: 189489 - DNA, 25 bp, Saccharomyces pastorianus
agtgcacttgtagcttccttatcga

SEQ ID NO: 189490 - DNA, 25 bp, Saccharomyces pastorianus
ttcttcatcatcattgctttcgctt

SEQ ID NO: 189491 - DNA, 25 bp, Saccharomyces pastorianus
atctattacattatgggtggtatgt

SEQ ID NO: 189492 - DNA, 25 bp, Saccharomyces pastorianus
ctattacattatgggtggtatgttg

SEQ ID NO: 189493 - DNA, 25 bp, Saccharomyces pastorianus
cattatgggtggtatgttggaataa

SEQ ID NO: 189494 - DNA, 25 bp, Saccharomyces pastorianus
tctattacattatgggtggtatgtt

SEQ ID NO: 189495 - DNA, 25 bp, Saccharomyces pastorianus
cattagatctattacattatgggtg

SEQ ID NO: 189496 - DNA, 25 bp, Saccharomyces pastorianus
ttagatctattacattatgggtggt

SEQ ID NO: 189497 - DNA, 25 bp, Saccharomyces pastorianus
attatgggtggtatgttggaataaa

SEQ ID NO: 189498 - DNA, 25 bp, Saccharomyces pastorianus
tcattagatctattacattatgggt

SEQ ID NO: 189499 - DNA, 25 bp, Saccharomyces pastorianus
gatctattacattatgggtggtatg

SEQ ID NO: 189500 - DNA, 25 bp, Saccharomyces pastorianus
ttcattagatctattacattatggg

SEQ ID NO: 189501 - DNA, 25 bp, Saccharomyces pastorianus
attagatctattacattatgggtgg

SEQ ID NO: 189502 - DNA, 25 bp, Saccharomyces pastorianus
tggtttggtatgttagtgctgatgt

SEQ ID NO: 189503 - DNA, 25 bp, Saccharomyces pastorianus
gaccattgtattggtttggtatgtt

SEQ ID NO: 189504 - DNA, 25 bp, Saccharomyces pastorianus
tgaccattgtattggtttggtatgt

SEQ ID NO: 189505 - DNA, 25 bp, Saccharomyces pastorianus
ttgaccattgtattggtttggtatg

SEQ ID NO: 189506 - DNA, 25 bp, Saccharomyces pastorianus
ccattgtattggtttggtatgttag

SEQ ID NO: 189507 - DNA, 25 bp, Saccharomyces pastorianus
ttggtttggtatgttagtgctgatg

SEQ ID NO: 189508 - DNA, 25 bp, Saccharomyces pastorianus
attggtttggtatgttagtgctgat

SEQ ID NO: 189509 - DNA, 25 bp, Saccharomyces pastorianus
tattggtttggtatgttagtgctga

SEQ ID NO: 189510 - DNA, 25 bp, Saccharomyces pastorianus
accattgtattggtttggtatgtta

SEQ ID NO: 189511 - DNA, 25 bp, Saccharomyces pastorianus
gtattggtttggtatgttagtgctg

SEQ ID NO: 189512 - DNA, 25 bp, Saccharomyces pastorianus
tgtattggtttggtatgttagtgct

SEQ ID NO: 189513 - DNA, 25 bp, Saccharomyces pastorianus
ggaaaaatcttggaatgatgaaaaa

SEQ ID NO: 189514 - DNA, 25 bp, Saccharomyces pastorianus
ctggaaaaatcttggaatgatgaaa

SEQ ID NO: 189515 - DNA, 25 bp, Saccharomyces pastorianus
gaattgcaagaaaaaagactggaaa

SEQ ID NO: 189516 - DNA, 25 bp, Saccharomyces pastorianus
agactggaaaaatcttggaatgatg

SEQ ID NO: 189517 - DNA, 25 bp, Saccharomyces pastorianus
aagactggaaaaatcttggaatgat

SEQ ID NO: 189518 - DNA, 25 bp, Saccharomyces pastorianus
tgatgaaaaagaaagcctgaaactt

SEQ ID NO: 189519 - DNA, 25 bp, Saccharomyces pastorianus
gactggaaaaatcttggaatgatga

SEQ ID NO: 189520 - DNA, 25 bp, Saccharomyces pastorianus
tggaaaaatcttggaatgatgaaaa

SEQ ID NO: 189521 - DNA, 25 bp, Saccharomyces pastorianus
agaattgcaagaaaaaagactggaa

SEQ ID NO: 189522 - DNA, 25 bp, Saccharomyces pastorianus
aagaattgcaagaaaaaagactgga

SEQ ID NO: 189523 - DNA, 25 bp, Saccharomyces pastorianus
actggaaaaatcttggaatgatgaa

SEQ ID NO: 189524 - DNA, 25 bp, Saccharomyces pastorianus
ttaacaacagaaatgcaaagcatgc

SEQ ID NO: 189525 - DNA, 25 bp, Saccharomyces pastorianus
tcgctttgggcaaatatctgcttaa

SEQ ID NO: 189526 - DNA, 25 bp, Saccharomyces pastorianus
cgctttgggcaaatatctgcttaac

SEQ ID NO: 189527 - DNA, 25 bp, Saccharomyces pastorianus
gggcaaatatctgcttaacaacaga

SEQ ID NO: 189528 - DNA, 25 bp, Saccharomyces pastorianus
gctttgggcaaatatctgcttaaca

SEQ ID NO: 189529 - DNA, 25 bp, Saccharomyces pastorianus
tttgggcaaatatctgcttaacaac

SEQ ID NO: 189530 - DNA, 25 bp, Saccharomyces pastorianus
ctttgggcaaatatctgcttaacaa

SEQ ID NO: 189531 - DNA, 25 bp, Saccharomyces pastorianus
atctgcttaacaacagaaatgcaaa

SEQ ID NO: 189532 - DNA, 25 bp, Saccharomyces pastorianus
ggcaaatatctgcttaacaacagaa

SEQ ID NO: 189533 - DNA, 25 bp, Saccharomyces pastorianus
ctcgctttgggcaaatatctgctta

SEQ ID NO: 189534 - DNA, 25 bp, Saccharomyces pastorianus
tgggcaaatatctgcttaacaacag

SEQ ID NO: 189535 - DNA, 25 bp, Saccharomyces pastorianus
gggatgccacccaacatctactacg

SEQ ID NO: 189536 - DNA, 25 bp, Saccharomyces pastorianus
aacaacagcaggaggtacaacaaca

SEQ ID NO: 189537 - DNA, 25 bp, Saccharomyces pastorianus
aacaacctcagcagctacagcaaca

SEQ ID NO: 189538 - DNA, 25 bp, Saccharomyces pastorianus
ccaacatctactacgtcgacaacaa

SEQ ID NO: 189539 - DNA, 25 bp, Saccharomyces pastorianus
acaacaacaacctcagcagctacag

SEQ ID NO: 189540 - DNA, 25 bp, Saccharomyces pastorianus
aacaacaacctcagcagctacagca

SEQ ID NO: 189541 - DNA, 25 bp, Saccharomyces pastorianus
caacatctactacgtcgacaacaac

SEQ ID NO: 189542 - DNA, 25 bp, Saccharomyces pastorianus
acatctactacgtcgacaacaacag

SEQ ID NO: 189543 - DNA, 25 bp, Saccharomyces pastorianus
tctactacgtcgacaacaacagcag

SEQ ID NO: 189544 - DNA, 25 bp, Saccharomyces pastorianus
ggatgccacccaacatctactacgt

SEQ ID NO: 189545 - DNA, 25 bp, Saccharomyces pastorianus
acagcaggaggtacaacaacaacct

SEQ ID NO: 189546 - DNA, 25 bp, Saccharomyces pastorianus
aatacgacgaagcacaagatgaaac

SEQ ID NO: 189547 - DNA, 25 bp, Saccharomyces pastorianus
gttgaagaaaacatcctcagatata

SEQ ID NO: 189548 - DNA, 25 bp, Saccharomyces pastorianus
agatataaatgtatactcgaagagc

SEQ ID NO: 189549 - DNA, 25 bp, Saccharomyces pastorianus
tttcatgatcagaaataccgttgaa

SEQ ID NO: 189550 - DNA, 25 bp, Saccharomyces pastorianus
agtttgagataagcgtggtagacca

SEQ ID NO: 189551 - DNA, 25 bp, Saccharomyces pastorianus
ataccgttgaagaaaacatcctcag

SEQ ID NO: 189552 - DNA, 25 bp, Saccharomyces pastorianus
aacttttgtgtggaatttcatgatc

SEQ ID NO: 189553 - DNA, 25 bp, Saccharomyces pastorianus
gcgtggtagaccaagaagtcagtaa

SEQ ID NO: 189554 - DNA, 25 bp, Saccharomyces pastorianus
aaaggcgataaatacgacgaagcac

SEQ ID NO: 189555 - DNA, 25 bp, Saccharomyces pastorianus
gaaacggataatgaggaaagcgatg

SEQ ID NO: 189556 - DNA, 25 bp, Saccharomyces pastorianus
aagcgatgatgcgaagtttgagata

SEQ ID NO: 189557 - DNA, 25 bp, Saccharomyces pastorianus
gggtcttttcattcagattttctgt

SEQ ID NO: 189558 - DNA, 25 bp, Saccharomyces pastorianus
aatacactgttctttcttgtgggtg

SEQ ID NO: 189559 - DNA, 25 bp, Saccharomyces pastorianus
gattatcgtgggtcttttcattcag

SEQ ID NO: 189560 - DNA, 25 bp, Saccharomyces pastorianus
tgactgggcgtgttctacaagctgc

SEQ ID NO: 189561 - DNA, 25 bp, Saccharomyces pastorianus
tggataacttgaatactgcgcgtat

SEQ ID NO: 189562 - DNA, 25 bp, Saccharomyces pastorianus
aatggcacaccttttgtttatggaa

SEQ ID NO: 189563 - DNA, 25 bp, Saccharomyces pastorianus
aggtatatggtatttcctgcaaaat

SEQ ID NO: 189564 - DNA, 25 bp, Saccharomyces pastorianus
aagcaataaagtctggttccgattt

SEQ ID NO: 189565 - DNA, 25 bp, Saccharomyces pastorianus
ggacggattccaacgggatcgtcca

SEQ ID NO: 189566 - DNA, 25 bp, Saccharomyces pastorianus
gatttaattacatccttttgggcgg

SEQ ID NO: 189567 - DNA, 25 bp, Saccharomyces pastorianus
tgggttgctctcttcattggataac

SEQ ID NO: 189568 - DNA, 25 bp, Saccharomyces pastorianus
tctagcgggatcgaaccgctgatcc

SEQ ID NO: 189569 - DNA, 25 bp, Saccharomyces pastorianus
cgaaccgctgatccccgcgttatta

SEQ ID NO: 189570 - DNA, 25 bp, Saccharomyces pastorianus
gtctctagcgggatcgaaccgctga

SEQ ID NO: 189571 - DNA, 25 bp, Saccharomyces pastorianus
atggtctctagcgggatcgaaccgc

SEQ ID NO: 189572 - DNA, 25 bp, Saccharomyces pastorianus
tctctagcgggatcgaaccgctgat

SEQ ID NO: 189573 - DNA, 25 bp, Saccharomyces pastorianus
ctctagcgggatcgaaccgctgatc

SEQ ID NO: 189574 - DNA, 25 bp, Saccharomyces pastorianus
ggtctctagcgggatcgaaccgctg

SEQ ID NO: 189575 - DNA, 25 bp, Saccharomyces pastorianus
ggatcgaaccgctgatccccgcgtt

SEQ ID NO: 189576 - DNA, 25 bp, Saccharomyces pastorianus
tagcgggatcgaaccgctgatcccc

SEQ ID NO: 189577 - DNA, 25 bp, Saccharomyces pastorianus
atcgaaccgctgatccccgcgttat

SEQ ID NO: 189578 - DNA, 25 bp, Saccharomyces pastorianus
gctgatccccgcgttattagcacgg

SEQ ID NO: 189579 - DNA, 25 bp, Saccharomyces pastorianus
aattgtcatttagcagtccccatgt

SEQ ID NO: 189580 - DNA, 25 bp, Saccharomyces pastorianus
caattttccgtactcgatccgaata

SEQ ID NO: 189581 - DNA, 25 bp, Saccharomyces pastorianus
ggccaatctacaagtgcgtcgtcaa

SEQ ID NO: 189582 - DNA, 25 bp, Saccharomyces pastorianus
attgccgactcgtcttagcgattat

SEQ ID NO: 189583 - DNA, 25 bp, Saccharomyces pastorianus
tcgagccttctttgagcaacttgga

SEQ ID NO: 189584 - DNA, 25 bp, Saccharomyces pastorianus
atgtgggctgctagcatggcactga

SEQ ID NO: 189585 - DNA, 25 bp, Saccharomyces pastorianus
taaaacttttagcttgccgacgcgc

SEQ ID NO: 189586 - DNA, 25 bp, Saccharomyces pastorianus
gtattgatcatgctcgtaccttggc

SEQ ID NO: 189587 - DNA, 25 bp, Saccharomyces pastorianus
tacagtatgcagctcgtgtctggca

SEQ ID NO: 189588 - DNA, 25 bp, Saccharomyces pastorianus
gagctcacggctttacatggtattg

SEQ ID NO: 189589 - DNA, 25 bp, Saccharomyces pastorianus
acttaacttaccctgtcaatgcaca

SEQ ID NO: 189590 - DNA, 25 bp, Saccharomyces pastorianus
tggtctgttccatgaagagcacttg

SEQ ID NO: 189591 - DNA, 25 bp, Saccharomyces pastorianus
tgcgtcggagacaccttttgtatga

SEQ ID NO: 189592 - DNA, 25 bp, Saccharomyces pastorianus
attgctactttttctggacttgacg

SEQ ID NO: 189593 - DNA, 25 bp, Saccharomyces pastorianus
gttatgcatcggttctttcacacaa

SEQ ID NO: 189594 - DNA, 25 bp, Saccharomyces pastorianus
actagggttagcttctttctcattt

SEQ ID NO: 189595 - DNA, 25 bp, Saccharomyces pastorianus
atatgccgatgatcctcaagcactg

SEQ ID NO: 189596 - DNA, 25 bp, Saccharomyces pastorianus
gacaagttggtttcgccaatccact

SEQ ID NO: 189597 - DNA, 25 bp, Saccharomyces pastorianus
aagacctaggacctggaacgcctgt

SEQ ID NO: 189598 - DNA, 25 bp, Saccharomyces pastorianus
gctgttgttttgctttcgggacttc

SEQ ID NO: 189599 - DNA, 25 bp, Saccharomyces pastorianus
tgaacgcatcctttatctttggtgg

SEQ ID NO: 189600 - DNA, 25 bp, Saccharomyces pastorianus
tcaatttcttggtcatggtctgttc

SEQ ID NO: 189601 - DNA, 25 bp, Saccharomyces pastorianus
atctactaactagtatttatgttac

SEQ ID NO: 189602 - DNA, 25 bp, Saccharomyces pastorianus
ctactaactagtatttatgttacta

SEQ ID NO: 189603 - DNA, 25 bp, Saccharomyces pastorianus
tctactaactagtatttatgttact

SEQ ID NO: 189604 - DNA, 25 bp, Saccharomyces pastorianus
tgttactagtatattatcatatacg

SEQ ID NO: 189605 - DNA, 25 bp, Saccharomyces pastorianus
catctactaactagtatttatgtta

SEQ ID NO: 189606 - DNA, 25 bp, Saccharomyces pastorianus
tatgttactagtatattatcatata

SEQ ID NO: 189607 - DNA, 25 bp, Saccharomyces pastorianus
gaataaaaatcaactatcatctact

SEQ ID NO: 189608 - DNA, 25 bp, Saccharomyces pastorianus
ggaataaaaatcaactatcatctac

SEQ ID NO: 189609 - DNA, 25 bp, Saccharomyces pastorianus
gttggaataaaaatcaactatcatc

SEQ ID NO: 189610 - DNA, 25 bp, Saccharomyces pastorianus
aataaaaatcaactatcatctacta

SEQ ID NO: 189611 - DNA, 25 bp, Saccharomyces pastorianus
tcatctactaactagtatttatgtt

SEQ ID NO: 189612 - DNA, 25 bp, Saccharomyces pastorianus
tctgcattacctccagtatactcat

SEQ ID NO: 189613 - DNA, 25 bp, Saccharomyces pastorianus
tgcattacctccagtatactcattc

SEQ ID NO: 189614 - DNA, 25 bp, Saccharomyces pastorianus
tgtctgcattacctccagtatactc

SEQ ID NO: 189615 - DNA, 25 bp, Saccharomyces pastorianus
tatatacccgtcaacccaattcttt

SEQ ID NO: 189616 - DNA, 25 bp, Saccharomyces pastorianus
ctgcattacctccagtatactcatt

SEQ ID NO: 189617 - DNA, 25 bp, Saccharomyces pastorianus
gtctgcattacctccagtatactca

SEQ ID NO: 189618 - DNA, 25 bp, Saccharomyces pastorianus
actatatacccgtcaacccaattct

SEQ ID NO: 189619 - DNA, 25 bp, Saccharomyces pastorianus
agtatactcattccctccactatat

SEQ ID NO: 189620 - DNA, 25 bp, Saccharomyces pastorianus
atgtctgcattacctccagtatact

SEQ ID NO: 189621 - DNA, 25 bp, Saccharomyces pastorianus
tatactcattccctccactatatac

SEQ ID NO: 189622 - DNA, 25 bp, Saccharomyces pastorianus
ctatatacccgtcaacccaattctt

SEQ ID NO: 189623 - DNA, 25 bp, Saccharomyces pastorianus
gctgactatctgtacaccgtgatgc

SEQ ID NO: 189624 - DNA, 25 bp, Saccharomyces pastorianus
atttgtttcagttgtggcctctcca

SEQ ID NO: 189625 - DNA, 25 bp, Saccharomyces pastorianus
cgattttatctactacatggccgct

SEQ ID NO: 189626 - DNA, 25 bp, Saccharomyces pastorianus
atgggtctattataccgcttcagag

SEQ ID NO: 189627 - DNA, 25 bp, Saccharomyces pastorianus
tgcaatctgctgtttcccacgaaaa

SEQ ID NO: 189628 - DNA, 25 bp, Saccharomyces pastorianus
gaagcctttcatcatgtttggttgc

SEQ ID NO: 189629 - DNA, 25 bp, Saccharomyces pastorianus
gatcggtccatttgtacttggtttt

SEQ ID NO: 189630 - DNA, 25 bp, Saccharomyces pastorianus
ggttgcatcttggttccattgactt

SEQ ID NO: 189631 - DNA, 25 bp, Saccharomyces pastorianus
tcttccatgggtatctctttcttaa

SEQ ID NO: 189632 - DNA, 25 bp, Saccharomyces pastorianus
ctcattcaggtatcattggtgcgtt

SEQ ID NO: 189633 - DNA, 25 bp, Saccharomyces pastorianus
agttaccgtctctgtgcaatctgct

SEQ ID NO: 189634 - DNA, 25 bp, Saccharomyces pastorianus
cactgggttgtgtacaaggcaatca

SEQ ID NO: 189635 - DNA, 25 bp, Saccharomyces pastorianus
ggttgtgtacaaggcaatcatgccc

SEQ ID NO: 189636 - DNA, 25 bp, Saccharomyces pastorianus
caagtatgcaacagtgaagtgtgac

SEQ ID NO: 189637 - DNA, 25 bp, Saccharomyces pastorianus
gtgtacaaggcaatcatgcccactt

SEQ ID NO: 189638 - DNA, 25 bp, Saccharomyces pastorianus
gggttgtgtacaaggcaatcatgcc

SEQ ID NO: 189639 - DNA, 25 bp, Saccharomyces pastorianus
acaaggcaatcatgcccacttgcca

SEQ ID NO: 189640 - DNA, 25 bp, Saccharomyces pastorianus
gtacaaggcaatcatgcccacttgc

SEQ ID NO: 189641 - DNA, 25 bp, Saccharomyces pastorianus
cagtgaagtgtgacaatgggaaact

SEQ ID NO: 189642 - DNA, 25 bp, Saccharomyces pastorianus
gtatgcaacagtgaagtgtgacaat

SEQ ID NO: 189643 - DNA, 25 bp, Saccharomyces pastorianus
atgcccacttgccaactccaagtat

SEQ ID NO: 189644 - DNA, 25 bp, Saccharomyces pastorianus
ttgtgtacaaggcaatcatgcccac

SEQ ID NO: 189645 - DNA, 25 bp, Saccharomyces pastorianus
gtcaaacggtgtatcaggttaattc

SEQ ID NO: 189646 - DNA, 25 bp, Saccharomyces pastorianus
aaccagttgtcaaacggtgtatcag

SEQ ID NO: 189647 - DNA, 25 bp, Saccharomyces pastorianus
accagttgtcaaacggtgtatcagg

SEQ ID NO: 189648 - DNA, 25 bp, Saccharomyces pastorianus
aacggtgtatcaggttaattcacgg

SEQ ID NO: 189649 - DNA, 25 bp, Saccharomyces pastorianus
tcaaacggtgtatcaggttaattca

SEQ ID NO: 189650 - DNA, 25 bp, Saccharomyces pastorianus
taaccagttgtcaaacggtgtatca

SEQ ID NO: 189651 - DNA, 25 bp, Saccharomyces pastorianus
ttgtcaaacggtgtatcaggttaat

SEQ ID NO: 189652 - DNA, 25 bp, Saccharomyces pastorianus
ccagttgtcaaacggtgtatcaggt

SEQ ID NO: 189653 - DNA, 25 bp, Saccharomyces pastorianus
gttgtcaaacggtgtatcaggttaa

SEQ ID NO: 189654 - DNA, 25 bp, Saccharomyces pastorianus
caaacggtgtatcaggttaattcac

SEQ ID NO: 189655 - DNA, 25 bp, Saccharomyces pastorianus
agttgtcaaacggtgtatcaggtta

SEQ ID NO: 189656 - DNA, 25 bp, Saccharomyces pastorianus
gaaggacgtggacttggacccaaat

SEQ ID NO: 189657 - DNA, 25 bp, Saccharomyces pastorianus
ttggacccaaatacctcagaacgaa

SEQ ID NO: 189658 - DNA, 25 bp, Saccharomyces pastorianus
aagacgatgtcccagtgctagattc

SEQ ID NO: 189659 - DNA, 25 bp, Saccharomyces pastorianus
ggatgatccagaggctcctgtaaag

SEQ ID NO: 189660 - DNA, 25 bp, Saccharomyces pastorianus
gacactacttcgaactttcaaggtt

SEQ ID NO: 189661 - DNA, 25 bp, Saccharomyces pastorianus
aagaacaaggccaccggtgcggatg

SEQ ID NO: 189662 - DNA, 25 bp, Saccharomyces pastorianus
cagtgctagattcctctgatgacga

SEQ ID NO: 189663 - DNA, 25 bp, Saccharomyces pastorianus
gaaatttgccggcttggactttgtt

SEQ ID NO: 189664 - DNA, 25 bp, Saccharomyces pastorianus
ggttggaacttcttggccgaggcca

SEQ ID NO: 189665 - DNA, 25 bp, Saccharomyces pastorianus
gatttggatgcggacgacactactt

SEQ ID NO: 189666 - DNA, 25 bp, Saccharomyces pastorianus
cttggactttgttcccacaatcagt

SEQ ID NO: 189667 - DNA, 25 bp, Saccharomyces pastorianus
tacgttactagtatattatcatata

SEQ ID NO: 189668 - DNA, 25 bp, Saccharomyces pastorianus
ttacgttactagtatattatcatat

SEQ ID NO: 189669 - DNA, 25 bp, Saccharomyces pastorianus
tagtatttacgttactagtatatta

SEQ ID NO: 189670 - DNA, 25 bp, Saccharomyces pastorianus
atttacgttactagtatattatcat

SEQ ID NO: 189671 - DNA, 25 bp, Saccharomyces pastorianus
tctactaactagtatttacgttact

SEQ ID NO: 189672 - DNA, 25 bp, Saccharomyces pastorianus
catctactaactagtatttacgtta

SEQ ID NO: 189673 - DNA, 25 bp, Saccharomyces pastorianus
tatttacgttactagtatattatca

SEQ ID NO: 189674 - DNA, 25 bp, Saccharomyces pastorianus
tttacgttactagtatattatcata

SEQ ID NO: 189675 - DNA, 25 bp, Saccharomyces pastorianus
acgttactagtatattatcatatac

SEQ ID NO: 189676 - DNA, 25 bp, Saccharomyces pastorianus
agtatttacgttactagtatattat

SEQ ID NO: 189677 - DNA, 25 bp, Saccharomyces pastorianus
gtatttacgttactagtatattatc

SEQ ID NO: 189678 - DNA, 25 bp, Saccharomyces pastorianus
gagcctttgtttagagttcatgacg

SEQ ID NO: 189679 - DNA, 25 bp, Saccharomyces pastorianus
gatgaatctgattgggactccgggt

SEQ ID NO: 189680 - DNA, 25 bp, Saccharomyces pastorianus
agatgagcctattaactccaccaga

SEQ ID NO: 189681 - DNA, 25 bp, Saccharomyces pastorianus
ttatcaatattgaccagccctcagg

SEQ ID NO: 189682 - DNA, 25 bp, Saccharomyces pastorianus
taataaatccactagggcctacagg

SEQ ID NO: 189683 - DNA, 25 bp, Saccharomyces pastorianus
gcgtggagctaactgacgactcgca

SEQ ID NO: 189684 - DNA, 25 bp, Saccharomyces pastorianus
gggttatccagcctatctatttctg

SEQ ID NO: 189685 - DNA, 25 bp, Saccharomyces pastorianus
atagaggtgttttccgtggtattga

SEQ ID NO: 189686 - DNA, 25 bp, Saccharomyces pastorianus
aatcgtacacattttcactctgcta

SEQ ID NO: 189687 - DNA, 25 bp, Saccharomyces pastorianus
agaaaccatcatcgctcaatcaatc

SEQ ID NO: 189688 - DNA, 25 bp, Saccharomyces pastorianus
acattagccattcttctcacagtga

SEQ ID NO: 189689 - DNA, 25 bp, Saccharomyces pastorianus
aatcgtgtcgccattgacaaccgta

SEQ ID NO: 189690 - DNA, 25 bp, Saccharomyces pastorianus
tgggcgttacctaaagctcacacat

SEQ ID NO: 189691 - DNA, 25 bp, Saccharomyces pastorianus
aaatcaacttaaactctggctgccc

SEQ ID NO: 189692 - DNA, 25 bp, Saccharomyces pastorianus
gaactaattctgagtgggcgttacc

SEQ ID NO: 189693 - DNA, 25 bp, Saccharomyces pastorianus
aagttgagtcaacgccacagctgaa

SEQ ID NO: 189694 - DNA, 25 bp, Saccharomyces pastorianus
tgccccatcgatttgctatacagac

SEQ ID NO: 189695 - DNA, 25 bp, Saccharomyces pastorianus
gttcaagtggcctgttctaaagcct

SEQ ID NO: 189696 - DNA, 25 bp, Saccharomyces pastorianus
aatggccttggcagttcccttaatt

SEQ ID NO: 189697 - DNA, 25 bp, Saccharomyces pastorianus
gacaaccgtaggcaatttaccatac

SEQ ID NO: 189698 - DNA, 25 bp, Saccharomyces pastorianus
acacatcagagttccccgggttcgg

SEQ ID NO: 189699 - DNA, 25 bp, Saccharomyces pastorianus
agaagcactcgcaaactccgtcagt

SEQ ID NO: 189700 - DNA, 25 bp, Saccharomyces pastorianus
gcttctgcaaccaccactctagctc

SEQ ID NO: 189701 - DNA, 25 bp, Saccharomyces pastorianus
tgctactgcttctgcaaccaccact

SEQ ID NO: 189702 - DNA, 25 bp, Saccharomyces pastorianus
actgcttctgcaaccaccactctag

SEQ ID NO: 189703 - DNA, 25 bp, Saccharomyces pastorianus
tgcttctgcaaccaccactctagct

SEQ ID NO: 189704 - DNA, 25 bp, Saccharomyces pastorianus
atcgctgctactgcttctgcaacca

SEQ ID NO: 189705 - DNA, 25 bp, Saccharomyces pastorianus
cgctgccatcgctgctactgcttct

SEQ ID NO: 189706 - DNA, 25 bp, Saccharomyces pastorianus
gctgctactgcttctgcaaccacca

SEQ ID NO: 189707 - DNA, 25 bp, Saccharomyces pastorianus
tgccatcgctgctactgcttctgca

SEQ ID NO: 189708 - DNA, 25 bp, Saccharomyces pastorianus
gccatcgctgctactgcttctgcaa

SEQ ID NO: 189709 - DNA, 25 bp, Saccharomyces pastorianus
ttctgcaaccaccactctagctcaa

SEQ ID NO: 189710 - DNA, 25 bp, Saccharomyces pastorianus
tactgcttctgcaaccaccactcta

SEQ ID NO: 189711 - DNA, 25 bp, Saccharomyces pastorianus
gagattaacaagagccagaggaaca

SEQ ID NO: 189712 - DNA, 25 bp, Saccharomyces pastorianus
ggagcaagtccgtcgccaaatctgg

SEQ ID NO: 189713 - DNA, 25 bp, Saccharomyces pastorianus
gagctgaagattgagaaccagactt

SEQ ID NO: 189714 - DNA, 25 bp, Saccharomyces pastorianus
ataaaacatctcaatcttttccttc

SEQ ID NO: 189715 - DNA, 25 bp, Saccharomyces pastorianus
gattttagtgatatgagcacccacg

SEQ ID NO: 189716 - DNA, 25 bp, Saccharomyces pastorianus
gaaaaagaaagttcatgggctcgaa

SEQ ID NO: 189717 - DNA, 25 bp, Saccharomyces pastorianus
acgaagatgtcaacggagcaagtcc

SEQ ID NO: 189718 - DNA, 25 bp, Saccharomyces pastorianus
gagaaccagactttgatagagatta

SEQ ID NO: 189719 - DNA, 25 bp, Saccharomyces pastorianus
tcatgggctcgaaagaaggaacctt

SEQ ID NO: 189720 - DNA, 25 bp, Saccharomyces pastorianus
gagcacccacgaagatgtcaacgga

SEQ ID NO: 189721 - DNA, 25 bp, Saccharomyces pastorianus
ggaaccttgaacttgaacagcgttt

SEQ ID NO: 189722 - DNA, 25 bp, Saccharomyces pastorianus
tgtacaaaagttcctgacgtttgtt

SEQ ID NO: 189723 - DNA, 25 bp, Saccharomyces pastorianus
gtacaaaagttcctgacgtttgttg

SEQ ID NO: 189724 - DNA, 25 bp, Saccharomyces pastorianus
ttttccgtgtcctggaacgttgtca

SEQ ID NO: 189725 - DNA, 25 bp, Saccharomyces pastorianus
aaaatcaacttgatggtctacacgt

SEQ ID NO: 189726 - DNA, 25 bp, Saccharomyces pastorianus
tacaaaagttcctgacgtttgttga

SEQ ID NO: 189727 - DNA, 25 bp, Saccharomyces pastorianus
atgtacaaaagttcctgacgtttgt

SEQ ID NO: 189728 - DNA, 25 bp, Saccharomyces pastorianus
tgagttttccgtgtcctggaacgtt

SEQ ID NO: 189729 - DNA, 25 bp, Saccharomyces pastorianus
gagttttccgtgtcctggaacgttg

SEQ ID NO: 189730 - DNA, 25 bp, Saccharomyces pastorianus
aatgtacaaaagttcctgacgtttg

SEQ ID NO: 189731 - DNA, 25 bp, Saccharomyces pastorianus
caaaagttcctgacgtttgttgaag

SEQ ID NO: 189732 - DNA, 25 bp, Saccharomyces pastorianus
gttgtcacgaaatagcgagtgccag

SEQ ID NO: 189733 - DNA, 25 bp, Saccharomyces pastorianus
attaaagctctcgatgggggtcgaa

SEQ ID NO: 189734 - DNA, 25 bp, Saccharomyces pastorianus
ctctcgatgggggtcgaacccataa

SEQ ID NO: 189735 - DNA, 25 bp, Saccharomyces pastorianus
gctctcgatgggggtcgaacccata

SEQ ID NO: 189736 - DNA, 25 bp, Saccharomyces pastorianus
tctcgatgggggtcgaacccataat

SEQ ID NO: 189737 - DNA, 25 bp, Saccharomyces pastorianus
gtattaaagctctcgatgggggtcg

SEQ ID NO: 189738 - DNA, 25 bp, Saccharomyces pastorianus
tgtattaaagctctcgatgggggtc

SEQ ID NO: 189739 - DNA, 25 bp, Saccharomyces pastorianus
taaagctctcgatgggggtcgaacc

SEQ ID NO: 189740 - DNA, 25 bp, Saccharomyces pastorianus
tattaaagctctcgatgggggtcga

SEQ ID NO: 189741 - DNA, 25 bp, Saccharomyces pastorianus
agctctcgatgggggtcgaacccat

SEQ ID NO: 189742 - DNA, 25 bp, Saccharomyces pastorianus
aagctctcgatgggggtcgaaccca

SEQ ID NO: 189743 - DNA, 25 bp, Saccharomyces pastorianus
ttaaagctctcgatgggggtcgaac

SEQ ID NO: 189744 - DNA, 25 bp, Saccharomyces pastorianus
tatacacagtcgaccgttttggccg

SEQ ID NO: 189745 - DNA, 25 bp, Saccharomyces pastorianus
agaccatccatttatccaacatgag

SEQ ID NO: 189746 - DNA, 25 bp, Saccharomyces pastorianus
tgccatgctccaacgtactatgatg

SEQ ID NO: 189747 - DNA, 25 bp, Saccharomyces pastorianus
gtttactggtaaacctgccatgctc

SEQ ID NO: 189748 - DNA, 25 bp, Saccharomyces pastorianus
aatggtccttcatctaagggtgctg

SEQ ID NO: 189749 - DNA, 25 bp, Saccharomyces pastorianus
ggttaacaaatgtccaccagaccat

SEQ ID NO: 189750 - DNA, 25 bp, Saccharomyces pastorianus
ttgtctttggtgttgttaatttctt

SEQ ID NO: 189751 - DNA, 25 bp, Saccharomyces pastorianus
aagccagagcttctcttgccaaggt

SEQ ID NO: 189752 - DNA, 25 bp, Saccharomyces pastorianus
aatgaaatctgctggtactgcatct

SEQ ID NO: 189753 - DNA, 25 bp, Saccharomyces pastorianus
ttttccacctgttgttccctataca

SEQ ID NO: 189754 - DNA, 25 bp, Saccharomyces pastorianus
gtcggtgtcactaaattatggccag

SEQ ID NO: 189755 - DNA, 25 bp, Saccharomyces pastorianus
atgaaagtttccgataggcgtaagt

SEQ ID NO: 189756 - DNA, 25 bp, Saccharomyces pastorianus
actttatttgaatcgatccccacgg

SEQ ID NO: 189757 - DNA, 25 bp, Saccharomyces pastorianus
tgagtcggctctaaataacaaaaac

SEQ ID NO: 189758 - DNA, 25 bp, Saccharomyces pastorianus
cgataggcgtaagtttgaaaaagca

SEQ ID NO: 189759 - DNA, 25 bp, Saccharomyces pastorianus
acgagtttgagtcggctctaaataa

SEQ ID NO: 189760 - DNA, 25 bp, Saccharomyces pastorianus
ctttatttgaatcgatccccacgga

SEQ ID NO: 189761 - DNA, 25 bp, Saccharomyces pastorianus
gagtcggctctaaataacaaaaacg

SEQ ID NO: 189762 - DNA, 25 bp, Saccharomyces pastorianus
gacgagtttgagtcggctctaaata

SEQ ID NO: 189763 - DNA, 25 bp, Saccharomyces pastorianus
tttgaaaaagcaaactttgacgagt

SEQ ID NO: 189764 - DNA, 25 bp, Saccharomyces pastorianus
tttatttgaatcgatccccacggaa

SEQ ID NO: 189765 - DNA, 25 bp, Saccharomyces pastorianus
gtttgagtcggctctaaataacaaa

SEQ ID NO: 189766 - DNA, 25 bp, Saccharomyces pastorianus
gaaaatcaaggctccttacaggaag

SEQ ID NO: 189767 - DNA, 25 bp, Saccharomyces pastorianus
gaattcactatcactataccggagg

SEQ ID NO: 189768 - DNA, 25 bp, Saccharomyces pastorianus
tataccggaggatgcagaactcatt

SEQ ID NO: 189769 - DNA, 25 bp, Saccharomyces pastorianus
aggaagcgaggatgcattcagtatc

SEQ ID NO: 189770 - DNA, 25 bp, Saccharomyces pastorianus
gctccttacaggaagtacgtggcgg

SEQ ID NO: 189771 - DNA, 25 bp, Saccharomyces pastorianus
gctttattatgcaccagcgttaaca

SEQ ID NO: 189772 - DNA, 25 bp, Saccharomyces pastorianus
gcagaactcattgagactccacagg

SEQ ID NO: 189773 - DNA, 25 bp, Saccharomyces pastorianus
atggttttgccatgggagatacagc

SEQ ID NO: 189774 - DNA, 25 bp, Saccharomyces pastorianus
catgtgtctaccaaagctttattat

SEQ ID NO: 189775 - DNA, 25 bp, Saccharomyces pastorianus
gcgggagagggtttctcctctacaa

SEQ ID NO: 189776 - DNA, 25 bp, Saccharomyces pastorianus
tcatcatcgacatcgtcctccaaag

SEQ ID NO: 189777 - DNA, 25 bp, Saccharomyces pastorianus
gtaaacttggactcttcggataatg

SEQ ID NO: 189778 - DNA, 25 bp, Saccharomyces pastorianus
gttagtgtaaacttggactcttcgg

SEQ ID NO: 189779 - DNA, 25 bp, Saccharomyces pastorianus
gtatagaggaaatccactcatcgga

SEQ ID NO: 189780 - DNA, 25 bp, Saccharomyces pastorianus
gtgtaaacttggactcttcggataa

SEQ ID NO: 189781 - DNA, 25 bp, Saccharomyces pastorianus
tattataacagtgacatcggatgac

SEQ ID NO: 189782 - DNA, 25 bp, Saccharomyces pastorianus
aacttggactcttcggataatgata

SEQ ID NO: 189783 - DNA, 25 bp, Saccharomyces pastorianus
gacatcggatgacagtatagaggaa

SEQ ID NO: 189784 - DNA, 25 bp, Saccharomyces pastorianus
agcgtcgttagtgtaaacttggact

SEQ ID NO: 189785 - DNA, 25 bp, Saccharomyces pastorianus
gtcgttagtgtaaacttggactctt

SEQ ID NO: 189786 - DNA, 25 bp, Saccharomyces pastorianus
tggactcttcggataatgatattat

SEQ ID NO: 189787 - DNA, 25 bp, Saccharomyces pastorianus
agaggaaatccactcatcggaacaa

SEQ ID NO: 189788 - DNA, 25 bp, Saccharomyces pastorianus
tcagtggtgctgctttgtccaacgc

SEQ ID NO: 189789 - DNA, 25 bp, Saccharomyces pastorianus
gcagcaatatctcagccagggtgtt

SEQ ID NO: 189790 - DNA, 25 bp, Saccharomyces pastorianus
agttctgattcgaacggctctaacc

SEQ ID NO: 189791 - DNA, 25 bp, Saccharomyces pastorianus
cagcccaatcgaatgctttcagaat

SEQ ID NO: 189792 - DNA, 25 bp, Saccharomyces pastorianus
atgaacatacgatcggccagtcggc

SEQ ID NO: 189793 - DNA, 25 bp, Saccharomyces pastorianus
gttcctgaacaatggccgtatccac

SEQ ID NO: 189794 - DNA, 25 bp, Saccharomyces pastorianus
atggccgtatccacaatactaccag

SEQ ID NO: 189795 - DNA, 25 bp, Saccharomyces pastorianus
ttcaacctctggtgcctgtatcata

SEQ ID NO: 189796 - DNA, 25 bp, Saccharomyces pastorianus
gtcctgccatcggtggcaatagcaa

SEQ ID NO: 189797 - DNA, 25 bp, Saccharomyces pastorianus
gcagtagcaacgtgccatactatta

SEQ ID NO: 189798 - DNA, 25 bp, Saccharomyces pastorianus
gtcgtccacatcagtagctatttcc

SEQ ID NO: 189799 - DNA, 25 bp, Saccharomyces pastorianus
gacaattggcaaaaggctacaagac

SEQ ID NO: 189800 - DNA, 25 bp, Saccharomyces pastorianus
aacaaattgtcaatgtctccttggg

SEQ ID NO: 189801 - DNA, 25 bp, Saccharomyces pastorianus
caagtgtgaccatcctcatggtggt

SEQ ID NO: 189802 - DNA, 25 bp, Saccharomyces pastorianus
ggcaaaaggctacaagactagaaga

SEQ ID NO: 189803 - DNA, 25 bp, Saccharomyces pastorianus
gtctaacaaattgtcaatgtctcct

SEQ ID NO: 189804 - DNA, 25 bp, Saccharomyces pastorianus
gtctccttggggacaattggcaaaa

SEQ ID NO: 189805 - DNA, 25 bp, Saccharomyces pastorianus
attggcaaaaggctacaagactaga

SEQ ID NO: 189806 - DNA, 25 bp, Saccharomyces pastorianus
acaagtgtgaccatcctcatggtgg

SEQ ID NO: 189807 - DNA, 25 bp, Saccharomyces pastorianus
aacaagtgtgaccatcctcatggtg

SEQ ID NO: 189808 - DNA, 25 bp, Saccharomyces pastorianus
ggtaaatctaagtctaacaaattgt

SEQ ID NO: 189809 - DNA, 25 bp, Saccharomyces pastorianus
tcgtggtaaatctaagtctaacaaa

SEQ ID NO: 189810 - DNA, 25 bp, Saccharomyces pastorianus
cgatggtgccgataatgatgattgt

SEQ ID NO: 189811 - DNA, 25 bp, Saccharomyces pastorianus
tagaggagctggttgtgttggttgt

SEQ ID NO: 189812 - DNA, 25 bp, Saccharomyces pastorianus
gcagacggaacagacggcggcgcta

SEQ ID NO: 189813 - DNA, 25 bp, Saccharomyces pastorianus
gactgtatcgatgatggtgccgatg

SEQ ID NO: 189814 - DNA, 25 bp, Saccharomyces pastorianus
ctggtaatgatgactgtatcgatga

SEQ ID NO: 189815 - DNA, 25 bp, Saccharomyces pastorianus
gacggcggcgctagaggagctggtt

SEQ ID NO: 189816 - DNA, 25 bp, Saccharomyces pastorianus
tatcgatgatggtgccgatggtgcc

SEQ ID NO: 189817 - DNA, 25 bp, Saccharomyces pastorianus
tgccagaggtgcagacggaacagac

SEQ ID NO: 189818 - DNA, 25 bp, Saccharomyces pastorianus
gatgactgtatcgatgatggtgccg

SEQ ID NO: 189819 - DNA, 25 bp, Saccharomyces pastorianus
gtgccgataatgatgattgtgttga

SEQ ID NO: 189820 - DNA, 25 bp, Saccharomyces pastorianus
atgattgtgttgatggtggtgccag

SEQ ID NO: 189821 - DNA, 25 bp, Saccharomyces pastorianus
cttttaattctatcattgcccgtat

SEQ ID NO: 189822 - DNA, 25 bp, Saccharomyces pastorianus
gagaggctgagcaattgagccaaat

SEQ ID NO: 189823 - DNA, 25 bp, Saccharomyces pastorianus
tccgccgtttcaagatcagtcttta

SEQ ID NO: 189824 - DNA, 25 bp, Saccharomyces pastorianus
agttcgaaatgttcctattggccat

SEQ ID NO: 189825 - DNA, 25 bp, Saccharomyces pastorianus
attgcccgtattgaactgtttggac

SEQ ID NO: 189826 - DNA, 25 bp, Saccharomyces pastorianus
gtgcctcccggaaaagaatctacat

SEQ ID NO: 189827 - DNA, 25 bp, Saccharomyces pastorianus
cagataaaggttcatccattctggg

SEQ ID NO: 189828 - DNA, 25 bp, Saccharomyces pastorianus
gggccctttatcgttggtctactca

SEQ ID NO: 189829 - DNA, 25 bp, Saccharomyces pastorianus
agtctttagtttgattgtgcctccc

SEQ ID NO: 189830 - DNA, 25 bp, Saccharomyces pastorianus
gttggtctactcactgacagaacgc

SEQ ID NO: 189831 - DNA, 25 bp, Saccharomyces pastorianus
catttttcagtatgttcagcattac

SEQ ID NO: 189832 - DNA, 25 bp, Saccharomyces pastorianus
tttgttttatttttcagtgttgatg

SEQ ID NO: 189833 - DNA, 25 bp, Saccharomyces pastorianus
ttcagtgttgatgtgagcttaacta

SEQ ID NO: 189834 - DNA, 25 bp, Saccharomyces pastorianus
tttatttttcagtgttgatgtgagc

SEQ ID NO: 189835 - DNA, 25 bp, Saccharomyces pastorianus
tatttttcagtgttgatgtgagctt

SEQ ID NO: 189836 - DNA, 25 bp, Saccharomyces pastorianus
tttcagtgttgatgtgagcttaact

SEQ ID NO: 189837 - DNA, 25 bp, Saccharomyces pastorianus
ttttcagtgttgatgtgagcttaac

SEQ ID NO: 189838 - DNA, 25 bp, Saccharomyces pastorianus
tatttgttttatttttcagtgttga

SEQ ID NO: 189839 - DNA, 25 bp, Saccharomyces pastorianus
cagtgttgatgtgagcttaactaaa

SEQ ID NO: 189840 - DNA, 25 bp, Saccharomyces pastorianus
tttttcagtgttgatgtgagcttaa

SEQ ID NO: 189841 - DNA, 25 bp, Saccharomyces pastorianus
atttttcagtgttgatgtgagctta

SEQ ID NO: 189842 - DNA, 25 bp, Saccharomyces pastorianus
tcagtgttgatgtgagcttaactaa

SEQ ID NO: 189843 - DNA, 25 bp, Saccharomyces pastorianus
tgatttctgggacttccgcgaagat

SEQ ID NO: 189844 - DNA, 25 bp, Saccharomyces pastorianus
ttgtttaataacacggccgcagcga

SEQ ID NO: 189845 - DNA, 25 bp, Saccharomyces pastorianus
gatccagcttatgggcaaggcgttg

SEQ ID NO: 189846 - DNA, 25 bp, Saccharomyces pastorianus
atgacaatgactacttcagccagcc

SEQ ID NO: 189847 - DNA, 25 bp, Saccharomyces pastorianus
aactgttatgcttgcgatccagctt

SEQ ID NO: 189848 - DNA, 25 bp, Saccharomyces pastorianus
ataccgtcatatccgcaactgttat

SEQ ID NO: 189849 - DNA, 25 bp, Saccharomyces pastorianus
tgtagcagatgctcaagcggcacgt

SEQ ID NO: 189850 - DNA, 25 bp, Saccharomyces pastorianus
cccgtgccctgttcaatttgatgaa

SEQ ID NO: 189851 - DNA, 25 bp, Saccharomyces pastorianus
taccggtgatgctgatttctgggac

SEQ ID NO: 189852 - DNA, 25 bp, Saccharomyces pastorianus
ggcgttgctaatgccttaggtatga

SEQ ID NO: 189853 - DNA, 25 bp, Saccharomyces pastorianus
tgcgctagatttcatcaaataccgt

SEQ ID NO: 189854 - DNA, 25 bp, Saccharomyces pastorianus
tccgccttgaattctgacaatatga

SEQ ID NO: 189855 - DNA, 25 bp, Saccharomyces pastorianus
ctctccgccttgaattctgacaata

SEQ ID NO: 189856 - DNA, 25 bp, Saccharomyces pastorianus
atcttatcgaactgttgggatgacc

SEQ ID NO: 189857 - DNA, 25 bp, Saccharomyces pastorianus
actgttgggatgaccgatatccttt

SEQ ID NO: 189858 - DNA, 25 bp, Saccharomyces pastorianus
gaacagcgcgttcagcaatcttatc

SEQ ID NO: 189859 - DNA, 25 bp, Saccharomyces pastorianus
cagcgcgttcagcaatcttatcgaa

SEQ ID NO: 189860 - DNA, 25 bp, Saccharomyces pastorianus
gatctattccatattccattatacg

SEQ ID NO: 189861 - DNA, 25 bp, Saccharomyces pastorianus
aaatggcggtagaacagcgcgttca

SEQ ID NO: 189862 - DNA, 25 bp, Saccharomyces pastorianus
tgggatgaccgatatccttttatac

SEQ ID NO: 189863 - DNA, 25 bp, Saccharomyces pastorianus
aattctgacaatatgatctattcca

SEQ ID NO: 189864 - DNA, 25 bp, Saccharomyces pastorianus
tcagcaatcttatcgaactgttggg

SEQ ID NO: 189865 - DNA, 25 bp, Saccharomyces pastorianus
aacaactgcttttatatgcctacag

SEQ ID NO: 189866 - DNA, 25 bp, Saccharomyces pastorianus
tgatattgccaacctcattttgcgt

SEQ ID NO: 189867 - DNA, 25 bp, Saccharomyces pastorianus
ggaaaactttttaatcgcgagtatg

SEQ ID NO: 189868 - DNA, 25 bp, Saccharomyces pastorianus
aactgcttttatatgcctacagtgg

SEQ ID NO: 189869 - DNA, 25 bp, Saccharomyces pastorianus
tgcctacagtggttgatattgccaa

SEQ ID NO: 189870 - DNA, 25 bp, Saccharomyces pastorianus
ttgaacaactgcttttatatgccta

SEQ ID NO: 189871 - DNA, 25 bp, Saccharomyces pastorianus
ctttgcatgcaaggctcagtttgat

SEQ ID NO: 189872 - DNA, 25 bp, Saccharomyces pastorianus
cgcggcttttactttgcatgcaagg

SEQ ID NO: 189873 - DNA, 25 bp, Saccharomyces pastorianus
ctttttaatcgcgagtatgtccgcg

SEQ ID NO: 189874 - DNA, 25 bp, Saccharomyces pastorianus
ggctcagtttgataacctttgggga

SEQ ID NO: 189875 - DNA, 25 bp, Saccharomyces pastorianus
gaacaactgcttttatatgcctaca

SEQ ID NO: 189876 - DNA, 25 bp, Saccharomyces pastorianus
tctatgcccacgtaaacccactgag

SEQ ID NO: 189877 - DNA, 25 bp, Saccharomyces pastorianus
gtaaacccactgagataaagtactt

SEQ ID NO: 189878 - DNA, 25 bp, Saccharomyces pastorianus
ctgagataaagtacttttcacagat

SEQ ID NO: 189879 - DNA, 25 bp, Saccharomyces pastorianus
gatctatgcccacgtaaacccactg

SEQ ID NO: 189880 - DNA, 25 bp, Saccharomyces pastorianus
cactgagataaagtacttttcacag

SEQ ID NO: 189881 - DNA, 25 bp, Saccharomyces pastorianus
atgcccacgtaaacccactgagata

SEQ ID NO: 189882 - DNA, 25 bp, Saccharomyces pastorianus
tgcccacgtaaacccactgagataa

SEQ ID NO: 189883 - DNA, 25 bp, Saccharomyces pastorianus
actgagataaagtacttttcacaga

SEQ ID NO: 189884 - DNA, 25 bp, Saccharomyces pastorianus
tatgcccacgtaaacccactgagat

SEQ ID NO: 189885 - DNA, 25 bp, Saccharomyces pastorianus
cacgtaaacccactgagataaagta

SEQ ID NO: 189886 - DNA, 25 bp, Saccharomyces pastorianus
cgtaaacccactgagataaagtact

SEQ ID NO: 189887 - DNA, 25 bp, Saccharomyces pastorianus
aagctcacgcaactttgatacgcac

SEQ ID NO: 189888 - DNA, 25 bp, Saccharomyces pastorianus
cacagcccaccaattttacgactaa

SEQ ID NO: 189889 - DNA, 25 bp, Saccharomyces pastorianus
atcaatcatgtctgaggagcctacg

SEQ ID NO: 189890 - DNA, 25 bp, Saccharomyces pastorianus
aaagcatagcttcatccaatacata

SEQ ID NO: 189891 - DNA, 25 bp, Saccharomyces pastorianus
gaagcacccgcaggcaatatagata

SEQ ID NO: 189892 - DNA, 25 bp, Saccharomyces pastorianus
gatgccatgacagaatcacagccaa

SEQ ID NO: 189893 - DNA, 25 bp, Saccharomyces pastorianus
gtatgaaccttgattttgacatcga

SEQ ID NO: 189894 - DNA, 25 bp, Saccharomyces pastorianus
ggtccgataacttcaaaatcttggg

SEQ ID NO: 189895 - DNA, 25 bp, Saccharomyces pastorianus
acgatttccctcttgatgatgctgg

SEQ ID NO: 189896 - DNA, 25 bp, Saccharomyces pastorianus
gagcctacggattttggatttgatc

SEQ ID NO: 189897 - DNA, 25 bp, Saccharomyces pastorianus
ataatttattgactccacagcccac

SEQ ID NO: 189898 - DNA, 25 bp, Saccharomyces pastorianus
gcaccagctgctagcgatgcaacta

SEQ ID NO: 189899 - DNA, 25 bp, Saccharomyces pastorianus
acaaccgctttcaaggctgttaccg

SEQ ID NO: 189900 - DNA, 25 bp, Saccharomyces pastorianus
tcactgtgatgacaagggctgttac

SEQ ID NO: 189901 - DNA, 25 bp, Saccharomyces pastorianus
aactacaaccgctttcaaggctgtt

SEQ ID NO: 189902 - DNA, 25 bp, Saccharomyces pastorianus
gatgcaactacaaccgctttcaagg

SEQ ID NO: 189903 - DNA, 25 bp, Saccharomyces pastorianus
atattccagcaccagctgctagcga

SEQ ID NO: 189904 - DNA, 25 bp, Saccharomyces pastorianus
gctgctagcgatgcaactacaaccg

SEQ ID NO: 189905 - DNA, 25 bp, Saccharomyces pastorianus
ggattccatattccagcaccagctg

SEQ ID NO: 189906 - DNA, 25 bp, Saccharomyces pastorianus
tgacaagggctgttacactaagacc

SEQ ID NO: 189907 - DNA, 25 bp, Saccharomyces pastorianus
aatggattccatattccagcaccag

SEQ ID NO: 189908 - DNA, 25 bp, Saccharomyces pastorianus
gctttcaaggctgttaccgttactc

SEQ ID NO: 189909 - DNA, 25 bp, Saccharomyces pastorianus
cttctcttgaacgttggtggctgag

SEQ ID NO: 189910 - DNA, 25 bp, Saccharomyces pastorianus
ccttctcttgaacgttggtggctga

SEQ ID NO: 189911 - DNA, 25 bp, Saccharomyces pastorianus
ctatttttgcatgcaccgtggtcct

SEQ ID NO: 189912 - DNA, 25 bp, Saccharomyces pastorianus
ttctcttgaacgttggtggctgagt

SEQ ID NO: 189913 - DNA, 25 bp, Saccharomyces pastorianus
caactatttttgcatgcaccgtggt

SEQ ID NO: 189914 - DNA, 25 bp, Saccharomyces pastorianus
actatttttgcatgcaccgtggtcc

SEQ ID NO: 189915 - DNA, 25 bp, Saccharomyces pastorianus
aactatttttgcatgcaccgtggtc

SEQ ID NO: 189916 - DNA, 25 bp, Saccharomyces pastorianus
ctcttgaacgttggtggctgagtcc

SEQ ID NO: 189917 - DNA, 25 bp, Saccharomyces pastorianus
atcaactatttttgcatgcaccgtg

SEQ ID NO: 189918 - DNA, 25 bp, Saccharomyces pastorianus
tcaactatttttgcatgcaccgtgg

SEQ ID NO: 189919 - DNA, 25 bp, Saccharomyces pastorianus
gaaaaactacctggcccttctcttg

SEQ ID NO: 189920 - DNA, 25 bp, Saccharomyces pastorianus
tacgcataacgcccatcattatcca

SEQ ID NO: 189921 - DNA, 25 bp, Saccharomyces pastorianus
actctcacattccactccatcaccc

SEQ ID NO: 189922 - DNA, 25 bp, Saccharomyces pastorianus
catcagtaccaaatgcactcgcatc

SEQ ID NO: 189923 - DNA, 25 bp, Saccharomyces pastorianus
tccatcacccatctctcaccatcag

SEQ ID NO: 189924 - DNA, 25 bp, Saccharomyces pastorianus
acgcataacgcccatcattatccac

SEQ ID NO: 189925 - DNA, 25 bp, Saccharomyces pastorianus
tactctcacattccactccatcacc

SEQ ID NO: 189926 - DNA, 25 bp, Saccharomyces pastorianus
catcacccatctctcaccatcagta

SEQ ID NO: 189927 - DNA, 25 bp, Saccharomyces pastorianus
ttacgcataacgcccatcattatcc

SEQ ID NO: 189928 - DNA, 25 bp, Saccharomyces pastorianus
ccatcacccatctctcaccatcagt

SEQ ID NO: 189929 - DNA, 25 bp, Saccharomyces pastorianus
atctctcaccatcagtaccaaatgc

SEQ ID NO: 189930 - DNA, 25 bp, Saccharomyces pastorianus
cgcataacgcccatcattatccaca

SEQ ID NO: 189931 - DNA, 25 bp, Saccharomyces pastorianus
gtggcactagtgttggagttggtac

SEQ ID NO: 189932 - DNA, 25 bp, Saccharomyces pastorianus
tagtagcactagtcctgacgttgat

SEQ ID NO: 189933 - DNA, 25 bp, Saccharomyces pastorianus
ttgatgctggcagtggtagtcgcat

SEQ ID NO: 189934 - DNA, 25 bp, Saccharomyces pastorianus
agtgctggagttggtacttccagtg

SEQ ID NO: 189935 - DNA, 25 bp, Saccharomyces pastorianus
gatgctggcagtggtagtcgcatta

SEQ ID NO: 189936 - DNA, 25 bp, Saccharomyces pastorianus
gatgctggcagtggtagtcgcacta

SEQ ID NO: 189937 - DNA, 25 bp, Saccharomyces pastorianus
ttccagtggtagtggcattagtgct

SEQ ID NO: 189938 - DNA, 25 bp, Saccharomyces pastorianus
ggcactagtgttggagttggtactt

SEQ ID NO: 189939 - DNA, 25 bp, Saccharomyces pastorianus
atgctggcagtggtagtcgcattag

SEQ ID NO: 189940 - DNA, 25 bp, Saccharomyces pastorianus
cttccagtggtagtggcattagtgc

SEQ ID NO: 189941 - DNA, 25 bp, Saccharomyces pastorianus
tgatgctggcagtggtagtcgcatt

SEQ ID NO: 189942 - DNA, 25 bp, Saccharomyces pastorianus
tcacaagccagttatgacggtgctg

SEQ ID NO: 189943 - DNA, 25 bp, Saccharomyces pastorianus
gaatacgattactcctccgaggatg

SEQ ID NO: 189944 - DNA, 25 bp, Saccharomyces pastorianus
aaaggtttcaaacttgccggctctg

SEQ ID NO: 189945 - DNA, 25 bp, Saccharomyces pastorianus
gccggctctgcccaagctcaattat

SEQ ID NO: 189946 - DNA, 25 bp, Saccharomyces pastorianus
gataccaaaggtgatggaagtcata

SEQ ID NO: 189947 - DNA, 25 bp, Saccharomyces pastorianus
taccgatgagaatgatcaacctatt

SEQ ID NO: 189948 - DNA, 25 bp, Saccharomyces pastorianus
actcctccgaggatgataccaaagg

SEQ ID NO: 189949 - DNA, 25 bp, Saccharomyces pastorianus
aagtcgtatagatgggtgagtgcat

SEQ ID NO: 189950 - DNA, 25 bp, Saccharomyces pastorianus
gtgacgaatacgattactcctccga

SEQ ID NO: 189951 - DNA, 25 bp, Saccharomyces pastorianus
tgagcgctgaacaggttggtagaaa

SEQ ID NO: 189952 - DNA, 25 bp, Saccharomyces pastorianus
gtgagtgcatcacaagccagttatg

SEQ ID NO: 189953 - DNA, 25 bp, Saccharomyces pastorianus
aaacacacatgcaacttgttggaat

SEQ ID NO: 189954 - DNA, 25 bp, Saccharomyces pastorianus
atgacacacatctaaaagttaataa

SEQ ID NO: 189955 - DNA, 25 bp, Saccharomyces pastorianus
gtattatgacacacatctaaaagtt

SEQ ID NO: 189956 - DNA, 25 bp, Saccharomyces pastorianus
taaaacacacatgcaacttgttgga

SEQ ID NO: 189957 - DNA, 25 bp, Saccharomyces pastorianus
ataaaacacacatgcaacttgttgg

SEQ ID NO: 189958 - DNA, 25 bp, Saccharomyces pastorianus
tgcagtattatgacacacatctaaa

SEQ ID NO: 189959 - DNA, 25 bp, Saccharomyces pastorianus
aaaacacacatgcaacttgttggaa

SEQ ID NO: 189960 - DNA, 25 bp, Saccharomyces pastorianus
gcagtattatgacacacatctaaaa

SEQ ID NO: 189961 - DNA, 25 bp, Saccharomyces pastorianus
aacacacatgcaacttgttggaata

SEQ ID NO: 189962 - DNA, 25 bp, Saccharomyces pastorianus
atgcagtattatgacacacatctaa

SEQ ID NO: 189963 - DNA, 25 bp, Saccharomyces pastorianus
acacacatgcaacttgttggaataa

SEQ ID NO: 189964 - DNA, 25 bp, Saccharomyces pastorianus
ccggtggtttattgctggctttatc

SEQ ID NO: 189965 - DNA, 25 bp, Saccharomyces pastorianus
gctggtatcggtgcagttgtttact

SEQ ID NO: 189966 - DNA, 25 bp, Saccharomyces pastorianus
ggtacactttgctcctgggtaatat

SEQ ID NO: 189967 - DNA, 25 bp, Saccharomyces pastorianus
ggtggtttcacagcagtcactttag

SEQ ID NO: 189968 - DNA, 25 bp, Saccharomyces pastorianus
tttgcatctactgtggttgatccat

SEQ ID NO: 189969 - DNA, 25 bp, Saccharomyces pastorianus
taagactatagtgctggcccgtatt

SEQ ID NO: 189970 - DNA, 25 bp, Saccharomyces pastorianus
gagtatcagtcagtcctcaagcata

SEQ ID NO: 189971 - DNA, 25 bp, Saccharomyces pastorianus
gtcactttagcttgggtcatcatcg

SEQ ID NO: 189972 - DNA, 25 bp, Saccharomyces pastorianus
gtcatcatcgatctgcctgagacaa

SEQ ID NO: 189973 - DNA, 25 bp, Saccharomyces pastorianus
tactgtcttgggttagcgggtacac

SEQ ID NO: 189974 - DNA, 25 bp, Saccharomyces pastorianus
aactcaacatgattcgctagctgat

SEQ ID NO: 189975 - DNA, 25 bp, Saccharomyces pastorianus
actgacaggcgttatttgacaatga

SEQ ID NO: 189976 - DNA, 25 bp, Saccharomyces pastorianus
ccttttggctttactgacaggcgtt

SEQ ID NO: 189977 - DNA, 25 bp, Saccharomyces pastorianus
aactgtctctttttttgatgttgga

SEQ ID NO: 189978 - DNA, 25 bp, Saccharomyces pastorianus
ttctccagcgggaacaccttttggc

SEQ ID NO: 189979 - DNA, 25 bp, Saccharomyces pastorianus
gcgggaacaccttttggctttactg

SEQ ID NO: 189980 - DNA, 25 bp, Saccharomyces pastorianus
tgatgttggacgttttagagaatac

SEQ ID NO: 189981 - DNA, 25 bp, Saccharomyces pastorianus
tgaggtgggctacgtatctactgtc

SEQ ID NO: 189982 - DNA, 25 bp, Saccharomyces pastorianus
aacaccttttggctttactgacagg

SEQ ID NO: 189983 - DNA, 25 bp, Saccharomyces pastorianus
ggctttactgacaggcgttatttga

SEQ ID NO: 189984 - DNA, 25 bp, Saccharomyces pastorianus
tttgacaatgaatgaggtgggctac

SEQ ID NO: 189985 - DNA, 25 bp, Saccharomyces pastorianus
gagcaatacagcataactgtctctt

SEQ ID NO: 189986 - DNA, 25 bp, Saccharomyces pastorianus
gtttttcataactacatacgccgca

SEQ ID NO: 189987 - DNA, 25 bp, Saccharomyces pastorianus
atctttggtgctctttaatctggaa

SEQ ID NO: 189988 - DNA, 25 bp, Saccharomyces pastorianus
gatgctatcatgtatgctacgtatt

SEQ ID NO: 189989 - DNA, 25 bp, Saccharomyces pastorianus
tttaccttaggtatggccaatttag

SEQ ID NO: 189990 - DNA, 25 bp, Saccharomyces pastorianus
gaatctgggacgctcttatttaaga

SEQ ID NO: 189991 - DNA, 25 bp, Saccharomyces pastorianus
gatggagtccctgaatcagacgtta

SEQ ID NO: 189992 - DNA, 25 bp, Saccharomyces pastorianus
ggattactctaatgcctttttcaaa

SEQ ID NO: 189993 - DNA, 25 bp, Saccharomyces pastorianus
atgaatacatgcctgaacccgacgt

SEQ ID NO: 189994 - DNA, 25 bp, Saccharomyces pastorianus
ggccaatttaggttctccaaatacg

SEQ ID NO: 189995 - DNA, 25 bp, Saccharomyces pastorianus
tcccgctttacaacgcttctaatga

SEQ ID NO: 189996 - DNA, 25 bp, Saccharomyces pastorianus
atttttgggcaggtggttcatggaa

SEQ ID NO: 189997 - DNA, 25 bp, Saccharomyces pastorianus
tcaactaatgaacctgtcgggccca

SEQ ID NO: 189998 - DNA, 25 bp, Saccharomyces pastorianus
tcctctgctgcgacagttattgcaa

SEQ ID NO: 189999 - DNA, 25 bp, Saccharomyces pastorianus
aaagaggctgtattccacgcgaaac

SEQ ID NO: 190000 - DNA, 25 bp, Saccharomyces pastorianus
atagttccacgattggtgtctctga

SEQ ID NO: 190001 - DNA, 25 bp, Saccharomyces pastorianus
aaggcattagcttccaatttttcgt

SEQ ID NO: 190002 - DNA, 25 bp, Saccharomyces pastorianus
aaaggctctggatgaggcctccaaa

SEQ ID NO: 190003 - DNA, 25 bp, Saccharomyces pastorianus
ggactttttaaccaggtcagccgca

SEQ ID NO: 190004 - DNA, 25 bp, Saccharomyces pastorianus
aacgcaacccgaagagattcccatg

SEQ ID NO: 190005 - DNA, 25 bp, Saccharomyces pastorianus
tatcttaaatactccagcctaccat

SEQ ID NO: 190006 - DNA, 25 bp, Saccharomyces pastorianus
agacttgactgctcgtttggcgaat

SEQ ID NO: 190007 - DNA, 25 bp, Saccharomyces pastorianus
tgcaaacagtgtgaatccccaccat

SEQ ID NO: 190008 - DNA, 25 bp, Saccharomyces pastorianus
gggcaattacctgtttaactgcagg

SEQ ID NO: 190009 - DNA, 25 bp, Saccharomyces pastorianus
ttaactgcaggtatgcaaagcatgc

SEQ ID NO: 190010 - DNA, 25 bp, Saccharomyces pastorianus
aactgcaggtatgcaaagcatgcga

SEQ ID NO: 190011 - DNA, 25 bp, Saccharomyces pastorianus
gtttaactgcaggtatgcaaagcat

SEQ ID NO: 190012 - DNA, 25 bp, Saccharomyces pastorianus
gctttgggcaattacctgtttaact

SEQ ID NO: 190013 - DNA, 25 bp, Saccharomyces pastorianus
tttgggcaattacctgtttaactgc

SEQ ID NO: 190014 - DNA, 25 bp, Saccharomyces pastorianus
acctgtttaactgcaggtatgcaaa

SEQ ID NO: 190015 - DNA, 25 bp, Saccharomyces pastorianus
ctttgggcaattacctgtttaactg

SEQ ID NO: 190016 - DNA, 25 bp, Saccharomyces pastorianus
ttgggcaattacctgtttaactgca

SEQ ID NO: 190017 - DNA, 25 bp, Saccharomyces pastorianus
tgggcaattacctgtttaactgcag

SEQ ID NO: 190018 - DNA, 25 bp, Saccharomyces pastorianus
ggcaattacctgtttaactgcaggt

SEQ ID NO: 190019 - DNA, 25 bp, Saccharomyces pastorianus
aactgttttgcataacggccgtgat

SEQ ID NO: 190020 - DNA, 25 bp, Saccharomyces pastorianus
gcgatcccagtgagatagagcctat

SEQ ID NO: 190021 - DNA, 25 bp, Saccharomyces pastorianus
gattaggtaccccagaatctgtcaa

SEQ ID NO: 190022 - DNA, 25 bp, Saccharomyces pastorianus
aatggcgtggcttgcgatcccagtg

SEQ ID NO: 190023 - DNA, 25 bp, Saccharomyces pastorianus
gtagcacacataaccacgaaatctc

SEQ ID NO: 190024 - DNA, 25 bp, Saccharomyces pastorianus
aacgcatcacatgccattcgtttgg

SEQ ID NO: 190025 - DNA, 25 bp, Saccharomyces pastorianus
attcgtttgggcaatggcgtggctt

SEQ ID NO: 190026 - DNA, 25 bp, Saccharomyces pastorianus
gaatctgtcaaacccgcaaacgcat

SEQ ID NO: 190027 - DNA, 25 bp, Saccharomyces pastorianus
tgacagttcaactatcaccttcaaa

SEQ ID NO: 190028 - DNA, 25 bp, Saccharomyces pastorianus
ggaagtcagtactccactatggtga

SEQ ID NO: 190029 - DNA, 25 bp, Saccharomyces pastorianus
gaaatctcccgcctatccaatgatg

SEQ ID NO: 190030 - DNA, 25 bp, Saccharomyces pastorianus
aaatggaaagaactactctctcaac

SEQ ID NO: 190031 - DNA, 25 bp, Saccharomyces pastorianus
aatcatgttccacaggatctcgtag

SEQ ID NO: 190032 - DNA, 25 bp, Saccharomyces pastorianus
gagattgctgcgatagcacctccga

SEQ ID NO: 190033 - DNA, 25 bp, Saccharomyces pastorianus
agcacctccgaagaatgatgttgaa

SEQ ID NO: 190034 - DNA, 25 bp, Saccharomyces pastorianus
caggatctcgtagaagctagtttaa

SEQ ID NO: 190035 - DNA, 25 bp, Saccharomyces pastorianus
gtttaaatcctgaagcaatccgaga

SEQ ID NO: 190036 - DNA, 25 bp, Saccharomyces pastorianus
gacagattctttgctattttcatgg

SEQ ID NO: 190037 - DNA, 25 bp, Saccharomyces pastorianus
gacgtttatattccaagacctttca

SEQ ID NO: 190038 - DNA, 25 bp, Saccharomyces pastorianus
agttcatgatgtcgtcctgcccaag

SEQ ID NO: 190039 - DNA, 25 bp, Saccharomyces pastorianus
gcaatccgagagctcactcaaaaat

SEQ ID NO: 190040 - DNA, 25 bp, Saccharomyces pastorianus
ctgcccaagtttcctgataaaagtt

SEQ ID NO: 190041 - DNA, 25 bp, Saccharomyces pastorianus
ggagattagacctaccgtcgtcaag

SEQ ID NO: 190042 - DNA, 25 bp, Saccharomyces pastorianus
taaattggcttctgcaaggtggaaa

SEQ ID NO: 190043 - DNA, 25 bp, Saccharomyces pastorianus
gcgcgagttagaccctgccaaaaag

SEQ ID NO: 190044 - DNA, 25 bp, Saccharomyces pastorianus
gatgcttacgaaaagactttgcccc

SEQ ID NO: 190045 - DNA, 25 bp, Saccharomyces pastorianus
ttctcctccgattacattacagcag

SEQ ID NO: 190046 - DNA, 25 bp, Saccharomyces pastorianus
caaagagaccctctggtccctttat

SEQ ID NO: 190047 - DNA, 25 bp, Saccharomyces pastorianus
aacaacacatgttattggctgaccc

SEQ ID NO: 190048 - DNA, 25 bp, Saccharomyces pastorianus
ctttattcagttcacccaggagatt

SEQ ID NO: 190049 - DNA, 25 bp, Saccharomyces pastorianus
aatgccatcgactcagttaccggaa

SEQ ID NO: 190050 - DNA, 25 bp, Saccharomyces pastorianus
aaccggtcactcacataaggccatg

SEQ ID NO: 190051 - DNA, 25 bp, Saccharomyces pastorianus
gacagtatcgagcacataaccgcaa

SEQ ID NO: 190052 - DNA, 25 bp, Saccharomyces pastorianus
atcgatgaagatcttgtggaccaga

SEQ ID NO: 190053 - DNA, 25 bp, Saccharomyces pastorianus
ggtgcattccagtcgctgagtgctg

SEQ ID NO: 190054 - DNA, 25 bp, Saccharomyces pastorianus
gatgtcactatcgatgaagatcttg

SEQ ID NO: 190055 - DNA, 25 bp, Saccharomyces pastorianus
gatctacacgtgtctttgcaaggca

SEQ ID NO: 190056 - DNA, 25 bp, Saccharomyces pastorianus
ggcaagtcttgacagatttagacat

SEQ ID NO: 190057 - DNA, 25 bp, Saccharomyces pastorianus
gtgtctttgcaaggcaagtcttgac

SEQ ID NO: 190058 - DNA, 25 bp, Saccharomyces pastorianus
aacgtcatgggtgcattccagtcgc

SEQ ID NO: 190059 - DNA, 25 bp, Saccharomyces pastorianus
tcttgtggaccagaataagcccggt

SEQ ID NO: 190060 - DNA, 25 bp, Saccharomyces pastorianus
ggaccagaataagcccggtgacaga

SEQ ID NO: 190061 - DNA, 25 bp, Saccharomyces pastorianus
agagtcaacgtcatgggtgcattcc

SEQ ID NO: 190062 - DNA, 25 bp, Saccharomyces pastorianus
catgcaagatctacacgtgtctttg

SEQ ID NO: 190063 - DNA, 25 bp, Saccharomyces pastorianus
gcaacgttgacgagccataaaaata

SEQ ID NO: 190064 - DNA, 25 bp, Saccharomyces pastorianus
aaaaccaccaactatatcagagaag

SEQ ID NO: 190065 - DNA, 25 bp, Saccharomyces pastorianus
ggcttgaggaacaccactgtagagt

SEQ ID NO: 190066 - DNA, 25 bp, Saccharomyces pastorianus
aaagcacttcgatgttgcaaaagat

SEQ ID NO: 190067 - DNA, 25 bp, Saccharomyces pastorianus
taatacagagaccatgctaaagcag

SEQ ID NO: 190068 - DNA, 25 bp, Saccharomyces pastorianus
gaacaccactgtagagttgagtagt

SEQ ID NO: 190069 - DNA, 25 bp, Saccharomyces pastorianus
gataaagcacaccatttactgcaat

SEQ ID NO: 190070 - DNA, 25 bp, Saccharomyces pastorianus
atgattgttcaggtcagttgagcga

SEQ ID NO: 190071 - DNA, 25 bp, Saccharomyces pastorianus
gatacccttaacgtgggcttgagga

SEQ ID NO: 190072 - DNA, 25 bp, Saccharomyces pastorianus
gttgcaaaagatacccttaacgtgg

SEQ ID NO: 190073 - DNA, 25 bp, Saccharomyces pastorianus
gaaaggattgcaacgttgacgagcc

SEQ ID NO: 190074 - DNA, 25 bp, Saccharomyces pastorianus
tccttctcgagcacataggaatcct

SEQ ID NO: 190075 - DNA, 25 bp, Saccharomyces pastorianus
caagtccttctcgagcacataggaa

SEQ ID NO: 190076 - DNA, 25 bp, Saccharomyces pastorianus
ttactacaagtccttctcgagcaca

SEQ ID NO: 190077 - DNA, 25 bp, Saccharomyces pastorianus
acaagtccttctcgagcacatagga

SEQ ID NO: 190078 - DNA, 25 bp, Saccharomyces pastorianus
actacaagtccttctcgagcacata

SEQ ID NO: 190079 - DNA, 25 bp, Saccharomyces pastorianus
tacaagtccttctcgagcacatagg

SEQ ID NO: 190080 - DNA, 25 bp, Saccharomyces pastorianus
attacgattatttctgctttcgttt

SEQ ID NO: 190081 - DNA, 25 bp, Saccharomyces pastorianus
aagtccttctcgagcacataggaat

SEQ ID NO: 190082 - DNA, 25 bp, Saccharomyces pastorianus
agtccttctcgagcacataggaatc

SEQ ID NO: 190083 - DNA, 25 bp, Saccharomyces pastorianus
tactacaagtccttctcgagcacat

SEQ ID NO: 190084 - DNA, 25 bp, Saccharomyces pastorianus
acgattatttctgctttcgttttat

SEQ ID NO: 190085 - DNA, 25 bp, Saccharomyces pastorianus
aagcttcccgatgacttcgagaatt

SEQ ID NO: 190086 - DNA, 25 bp, Saccharomyces pastorianus
atagatgctaatatgagttctggaa

SEQ ID NO: 190087 - DNA, 25 bp, Saccharomyces pastorianus
aatggtaaagcttcccgatgacttc

SEQ ID NO: 190088 - DNA, 25 bp, Saccharomyces pastorianus
aatgaaatggtaaagcttcccgatg

SEQ ID NO: 190089 - DNA, 25 bp, Saccharomyces pastorianus
atggtaaagcttcccgatgacttcg

SEQ ID NO: 190090 - DNA, 25 bp, Saccharomyces pastorianus
gaaatggtaaagcttcccgatgact

SEQ ID NO: 190091 - DNA, 25 bp, Saccharomyces pastorianus
gctaatatgagttctggaataggaa

SEQ ID NO: 190092 - DNA, 25 bp, Saccharomyces pastorianus
aaagcttcccgatgacttcgagaat

SEQ ID NO: 190093 - DNA, 25 bp, Saccharomyces pastorianus
atgaatctcagaacaatagatgcta

SEQ ID NO: 190094 - DNA, 25 bp, Saccharomyces pastorianus
gcttcccgatgacttcgagaattat

SEQ ID NO: 190095 - DNA, 25 bp, Saccharomyces pastorianus
gtaaagcttcccgatgacttcgaga

SEQ ID NO: 190096 - DNA, 25 bp, Saccharomyces pastorianus
caatactttttcgtcgcaggcctcg

SEQ ID NO: 190097 - DNA, 25 bp, Saccharomyces pastorianus
gtgtgcaaacctgggattgtgcgtt

SEQ ID NO: 190098 - DNA, 25 bp, Saccharomyces pastorianus
gccattcaatactttttcgtcgcag

SEQ ID NO: 190099 - DNA, 25 bp, Saccharomyces pastorianus
attcaatactttttcgtcgcaggcc

SEQ ID NO: 190100 - DNA, 25 bp, Saccharomyces pastorianus
aaacctgggattgtgcgtttgccat

SEQ ID NO: 190101 - DNA, 25 bp, Saccharomyces pastorianus
ctgggattgtgcgtttgccattcaa

SEQ ID NO: 190102 - DNA, 25 bp, Saccharomyces pastorianus
tttttcgtcgcaggcctcgcagaaa

SEQ ID NO: 190103 - DNA, 25 bp, Saccharomyces pastorianus
ggcctcgcagaaagacctgaattct

SEQ ID NO: 190104 - DNA, 25 bp, Saccharomyces pastorianus
ttcgtcgcaggcctcgcagaaagac

SEQ ID NO: 190105 - DNA, 25 bp, Saccharomyces pastorianus
tatgggaacaaatggtgtgcaaacc

SEQ ID NO: 190106 - DNA, 25 bp, Saccharomyces pastorianus
ttgtgcgtttgccattcaatacttt

SEQ ID NO: 190107 - DNA, 25 bp, Saccharomyces pastorianus
aacatcattggccactagcacagtc

SEQ ID NO: 190108 - DNA, 25 bp, Saccharomyces pastorianus
cacaagtacagtcgtggtttcctgt

SEQ ID NO: 190109 - DNA, 25 bp, Saccharomyces pastorianus
caacttctcatactgctgcttccag

SEQ ID NO: 190110 - DNA, 25 bp, Saccharomyces pastorianus
aagaaactgcagcaaccaccatttc

SEQ ID NO: 190111 - DNA, 25 bp, Saccharomyces pastorianus
gcttccagcaccttcactggtattg

SEQ ID NO: 190112 - DNA, 25 bp, Saccharomyces pastorianus
tgttcagaaacaaccgacgctagcg

SEQ ID NO: 190113 - DNA, 25 bp, Saccharomyces pastorianus
caaccaccatttctccaaaatcata

SEQ ID NO: 190114 - DNA, 25 bp, Saccharomyces pastorianus
gtgacgaaaacggatgccatgttcc

SEQ ID NO: 190115 - DNA, 25 bp, Saccharomyces pastorianus
tgtcacttccgaggcttccaaacaa

SEQ ID NO: 190116 - DNA, 25 bp, Saccharomyces pastorianus
tagcacagtcaccaagtctgctgct

SEQ ID NO: 190117 - DNA, 25 bp, Saccharomyces pastorianus
gacgctagcggtaacatttacacca

SEQ ID NO: 190118 - DNA, 25 bp, Saccharomyces pastorianus
attggatgtgtctcagtgtcctgtt

SEQ ID NO: 190119 - DNA, 25 bp, Saccharomyces pastorianus
aactgcgctgggtgacaagccatta

SEQ ID NO: 190120 - DNA, 25 bp, Saccharomyces pastorianus
ggaaatacggcgcttatactgaatt

SEQ ID NO: 190121 - DNA, 25 bp, Saccharomyces pastorianus
gacatgggtccacagttgttgcaac

SEQ ID NO: 190122 - DNA, 25 bp, Saccharomyces pastorianus
gtgtcctgttatccgggcaatttga

SEQ ID NO: 190123 - DNA, 25 bp, Saccharomyces pastorianus
ttgcaacacttcttagatcctctgt

SEQ ID NO: 190124 - DNA, 25 bp, Saccharomyces pastorianus
agcggcactctacggacaatccaaa

SEQ ID NO: 190125 - DNA, 25 bp, Saccharomyces pastorianus
gtcagttctgcatcccatttaatag

SEQ ID NO: 190126 - DNA, 25 bp, Saccharomyces pastorianus
atggttgtgacttccttgatctcaa

SEQ ID NO: 190127 - DNA, 25 bp, Saccharomyces pastorianus
gaattatacggtgcgttatcccctg

SEQ ID NO: 190128 - DNA, 25 bp, Saccharomyces pastorianus
tatcccctgcgctgacgacaaaaga

SEQ ID NO: 190129 - DNA, 25 bp, Saccharomyces pastorianus
gcgaacttacaactcggcatcatga

SEQ ID NO: 190130 - DNA, 25 bp, Saccharomyces pastorianus
atcagcaatcagcaagtcttacctt

SEQ ID NO: 190131 - DNA, 25 bp, Saccharomyces pastorianus
ggcataatttcatcaggctcttcta

SEQ ID NO: 190132 - DNA, 25 bp, Saccharomyces pastorianus
aatgttttccagagctacttcctat

SEQ ID NO: 190133 - DNA, 25 bp, Saccharomyces pastorianus
gagattactctggtgttgacaacga

SEQ ID NO: 190134 - DNA, 25 bp, Saccharomyces pastorianus
tgtgacacattacatccttcatgat

SEQ ID NO: 190135 - DNA, 25 bp, Saccharomyces pastorianus
ggctcttctagccaagactttggta

SEQ ID NO: 190136 - DNA, 25 bp, Saccharomyces pastorianus
ttatcatgtcataacggctgccatt

SEQ ID NO: 190137 - DNA, 25 bp, Saccharomyces pastorianus
tgatccgtacttccctcaatttagg

SEQ ID NO: 190138 - DNA, 25 bp, Saccharomyces pastorianus
attcatgggccaaaggactatttcc

SEQ ID NO: 190139 - DNA, 25 bp, Saccharomyces pastorianus
cggctgccattatctctttagtcga

SEQ ID NO: 190140 - DNA, 25 bp, Saccharomyces pastorianus
atgggatatcctgcgtctaaatcaa

SEQ ID NO: 190141 - DNA, 25 bp, Saccharomyces pastorianus
cacggtgccttaaccaactgggcca

SEQ ID NO: 190142 - DNA, 25 bp, Saccharomyces pastorianus
ttatgggatatcctgcgtctaaatc

SEQ ID NO: 190143 - DNA, 25 bp, Saccharomyces pastorianus
tatgggatatcctgcgtctaaatca

SEQ ID NO: 190144 - DNA, 25 bp, Saccharomyces pastorianus
ttaaccaactgggccaagagaccag

SEQ ID NO: 190145 - DNA, 25 bp, Saccharomyces pastorianus
agagaccaggaatttatgggatatc

SEQ ID NO: 190146 - DNA, 25 bp, Saccharomyces pastorianus
gagaccaggaatttatgggatatcc

SEQ ID NO: 190147 - DNA, 25 bp, Saccharomyces pastorianus
cggtgccttaaccaactgggccaag

SEQ ID NO: 190148 - DNA, 25 bp, Saccharomyces pastorianus
gcacggtgccttaaccaactgggcc

SEQ ID NO: 190149 - DNA, 25 bp, Saccharomyces pastorianus
tttatgggatatcctgcgtctaaat

SEQ ID NO: 190150 - DNA, 25 bp, Saccharomyces pastorianus
taaccaactgggccaagagaccagg

SEQ ID NO: 190151 - DNA, 25 bp, Saccharomyces pastorianus
ttcgtcgtcgtctttttctacttct

SEQ ID NO: 190152 - DNA, 25 bp, Saccharomyces pastorianus
gatcgatgaagttttgtcttccaat

SEQ ID NO: 190153 - DNA, 25 bp, Saccharomyces pastorianus
gtcgtctttttctacttcttcatat

SEQ ID NO: 190154 - DNA, 25 bp, Saccharomyces pastorianus
gtcttccaatagtttttcttcctcg

SEQ ID NO: 190155 - DNA, 25 bp, Saccharomyces pastorianus
atacttttttggtcgttgctttgca

SEQ ID NO: 190156 - DNA, 25 bp, Saccharomyces pastorianus
atcgctgacctccagtatacttttt

SEQ ID NO: 190157 - DNA, 25 bp, Saccharomyces pastorianus
aatgtactcgagtagcgtgatcgat

SEQ ID NO: 190158 - DNA, 25 bp, Saccharomyces pastorianus
tccaatagtttttcttcctcgcttt

SEQ ID NO: 190159 - DNA, 25 bp, Saccharomyces pastorianus
gacgtcaaccggacaatgtactcga

SEQ ID NO: 190160 - DNA, 25 bp, Saccharomyces pastorianus
ttgctttgcaaagacgtcaaccgga

SEQ ID NO: 190161 - DNA, 25 bp, Saccharomyces pastorianus
ttttctacttcttcatatccactta

SEQ ID NO: 190162 - DNA, 25 bp, Saccharomyces pastorianus
atctattacattatgggtggtatgt

SEQ ID NO: 190163 - DNA, 25 bp, Saccharomyces pastorianus
ctattacattatgggtggtatgttg

SEQ ID NO: 190164 - DNA, 25 bp, Saccharomyces pastorianus
cattatgggtggtatgttggaataa

SEQ ID NO: 190165 - DNA, 25 bp, Saccharomyces pastorianus
cattagatctattacattatgggtg

SEQ ID NO: 190166 - DNA, 25 bp, Saccharomyces pastorianus
tctattacattatgggtggtatgtt

SEQ ID NO: 190167 - DNA, 25 bp, Saccharomyces pastorianus
ttagatctattacattatgggtggt

SEQ ID NO: 190168 - DNA, 25 bp, Saccharomyces pastorianus
attatgggtggtatgttggaataaa

SEQ ID NO: 190169 - DNA, 25 bp, Saccharomyces pastorianus
tcattagatctattacattatgggt

SEQ ID NO: 190170 - DNA, 25 bp, Saccharomyces pastorianus
gatctattacattatgggtggtatg

SEQ ID NO: 190171 - DNA, 25 bp, Saccharomyces pastorianus
ttcattagatctattacattatggg

SEQ ID NO: 190172 - DNA, 25 bp, Saccharomyces pastorianus
attagatctattacattatgggtgg

SEQ ID NO: 190173 - DNA, 25 bp, Saccharomyces pastorianus
atgtcttacagtttcttggatttcg

SEQ ID NO: 190174 - DNA, 25 bp, Saccharomyces pastorianus
cttccgagaatatgaatgtcttaca

SEQ ID NO: 190175 - DNA, 25 bp, Saccharomyces pastorianus
ttccgagaatatgaatgtcttacag

SEQ ID NO: 190176 - DNA, 25 bp, Saccharomyces pastorianus
acttccgagaatatgaatgtcttac

SEQ ID NO: 190177 - DNA, 25 bp, Saccharomyces pastorianus
cttacagtttcttggatttcggtct

SEQ ID NO: 190178 - DNA, 25 bp, Saccharomyces pastorianus
cttggatttcggtctgacgaaatta

SEQ ID NO: 190179 - DNA, 25 bp, Saccharomyces pastorianus
gaatgtcttacagtttcttggattt

SEQ ID NO: 190180 - DNA, 25 bp, Saccharomyces pastorianus
cagtttcttggatttcggtctgacg

SEQ ID NO: 190181 - DNA, 25 bp, Saccharomyces pastorianus
tccgagaatatgaatgtcttacagt

SEQ ID NO: 190182 - DNA, 25 bp, Saccharomyces pastorianus
acatcttttcctcggggatcctcta

SEQ ID NO: 190183 - DNA, 25 bp, Saccharomyces pastorianus
aacatcttttcctcggggatcctct

SEQ ID NO: 190184 - DNA, 25 bp, Saccharomyces pastorianus
gaggttggtgaattttgagataatt

SEQ ID NO: 190185 - DNA, 25 bp, Saccharomyces pastorianus
tgagaggttggtgaattttgagata

SEQ ID NO: 190186 - DNA, 25 bp, Saccharomyces pastorianus
catgagaggttggtgaattttgaga

SEQ ID NO: 190187 - DNA, 25 bp, Saccharomyces pastorianus
agaggttggtgaattttgagataat

SEQ ID NO: 190188 - DNA, 25 bp, Saccharomyces pastorianus
gattccaatgttgataaaggctgtt

SEQ ID NO: 190189 - DNA, 25 bp, Saccharomyces pastorianus
ggttggtgaattttgagataattgt

SEQ ID NO: 190190 - DNA, 25 bp, Saccharomyces pastorianus
gagaggttggtgaattttgagataa

SEQ ID NO: 190191 - DNA, 25 bp, Saccharomyces pastorianus
aggttggtgaattttgagataattg

SEQ ID NO: 190192 - DNA, 25 bp, Saccharomyces pastorianus
gttggtgaattttgagataattgtt

SEQ ID NO: 190193 - DNA, 25 bp, Saccharomyces pastorianus
atgagaggttggtgaattttgagat

SEQ ID NO: 190194 - DNA, 25 bp, Saccharomyces pastorianus
tggtgaattttgagataattgttgg

SEQ ID NO: 190195 - DNA, 25 bp, Saccharomyces pastorianus
aaccaggcttcgactggcgtcgtcc

SEQ ID NO: 190196 - DNA, 25 bp, Saccharomyces pastorianus
acaaccaggcttcgactggcgtcgt

SEQ ID NO: 190197 - DNA, 25 bp, Saccharomyces pastorianus
gactgagaagactatagaatacaat

SEQ ID NO: 190198 - DNA, 25 bp, Saccharomyces pastorianus
gactggcgtcgtcccgcgattctac

SEQ ID NO: 190199 - DNA, 25 bp, Saccharomyces pastorianus
ctttctcaccctttgactgagaaga

SEQ ID NO: 190200 - DNA, 25 bp, Saccharomyces pastorianus
cttcgactggcgtcgtcccgcgatt

SEQ ID NO: 190201 - DNA, 25 bp, Saccharomyces pastorianus
accctttgactgagaagactataga

SEQ ID NO: 190202 - DNA, 25 bp, Saccharomyces pastorianus
aaaacaaccaggcttcgactggcgt

SEQ ID NO: 190203 - DNA, 25 bp, Saccharomyces pastorianus
tcaccctttgactgagaagactata

SEQ ID NO: 190204 - DNA, 25 bp, Saccharomyces pastorianus
aaacaaccaggcttcgactggcgtc

SEQ ID NO: 190205 - DNA, 25 bp, Saccharomyces pastorianus
gaatacaaaaacaaccaggcttcga

SEQ ID NO: 190206 - DNA, 25 bp, Saccharomyces pastorianus
ataggaatcattatatcttacatgt

SEQ ID NO: 190207 - DNA, 25 bp, Saccharomyces pastorianus
tattctgttctgttgtagtaactaa

SEQ ID NO: 190208 - DNA, 25 bp, Saccharomyces pastorianus
catgttattctgttctgttgtagta

SEQ ID NO: 190209 - DNA, 25 bp, Saccharomyces pastorianus
atgtacttatttacaacctttgaga

SEQ ID NO: 190210 - DNA, 25 bp, Saccharomyces pastorianus
gcaaacgttcagtgagaacaacaac

SEQ ID NO: 190211 - DNA, 25 bp, Saccharomyces pastorianus
gagggcccaaaaatattagatcgag

SEQ ID NO: 190212 - DNA, 25 bp, Saccharomyces pastorianus
gttctgttgtagtaactaatttcag

SEQ ID NO: 190213 - DNA, 25 bp, Saccharomyces pastorianus
attgccgaaacgcaaacgttcagtg

SEQ ID NO: 190214 - DNA, 25 bp, Saccharomyces pastorianus
gaacaacaactgtatgacagcttta

SEQ ID NO: 190215 - DNA, 25 bp, Saccharomyces pastorianus
actgtatgacagctttagaaatatc

SEQ ID NO: 190216 - DNA, 25 bp, Saccharomyces pastorianus
atatcttacatgttattctgttctg

SEQ ID NO: 190217 - DNA, 25 bp, Saccharomyces pastorianus
gacacattgttattcctctacatgc

SEQ ID NO: 190218 - DNA, 25 bp, Saccharomyces pastorianus
ctctacatgctctctggaaaaactt

SEQ ID NO: 190219 - DNA, 25 bp, Saccharomyces pastorianus
ctttctttgatccttttctgtcata

SEQ ID NO: 190220 - DNA, 25 bp, Saccharomyces pastorianus
ttgccaacacattttcttcatcatc

SEQ ID NO: 190221 - DNA, 25 bp, Saccharomyces pastorianus
atttcctggacaaattctgtaccaa

SEQ ID NO: 190222 - DNA, 25 bp, Saccharomyces pastorianus
gtaaagcacgttttcgcacatatca

SEQ ID NO: 190223 - DNA, 25 bp, Saccharomyces pastorianus
atggtgtttttgtcccattgacaca

SEQ ID NO: 190224 - DNA, 25 bp, Saccharomyces pastorianus
ttttgcagtatcttcctttctttga

SEQ ID NO: 190225 - DNA, 25 bp, Saccharomyces pastorianus
atcttcttcagttaattcgctccgt

SEQ ID NO: 190226 - DNA, 25 bp, Saccharomyces pastorianus
atcattaagcccaatttgtcctgga

SEQ ID NO: 190227 - DNA, 25 bp, Saccharomyces pastorianus
tttgctactctatttcttgccccaa

SEQ ID NO: 190228 - DNA, 25 bp, Saccharomyces pastorianus
aggcgacagcttccatgtcgatcgt

SEQ ID NO: 190229 - DNA, 25 bp, Saccharomyces pastorianus
gatcgttgcgttaccgtctagcttc

SEQ ID NO: 190230 - DNA, 25 bp, Saccharomyces pastorianus
ttggctgaaaaacaggcgacagctt

SEQ ID NO: 190231 - DNA, 25 bp, Saccharomyces pastorianus
ggcgacagcttccatgtcgatcgtt

SEQ ID NO: 190232 - DNA, 25 bp, Saccharomyces pastorianus
aacaggcgacagcttccatgtcgat

SEQ ID NO: 190233 - DNA, 25 bp, Saccharomyces pastorianus
cgttgcgttaccgtctagcttccag

SEQ ID NO: 190234 - DNA, 25 bp, Saccharomyces pastorianus
gtcgatcgttgcgttaccgtctagc

SEQ ID NO: 190235 - DNA, 25 bp, Saccharomyces pastorianus
tgaaaaacaggcgacagcttccatg

SEQ ID NO: 190236 - DNA, 25 bp, Saccharomyces pastorianus
atcgttgcgttaccgtctagcttcc

SEQ ID NO: 190237 - DNA, 25 bp, Saccharomyces pastorianus
tcgatcgttgcgttaccgtctagct

SEQ ID NO: 190238 - DNA, 25 bp, Saccharomyces pastorianus
cgatcgttgcgttaccgtctagctt

SEQ ID NO: 190239 - DNA, 25 bp, Saccharomyces pastorianus
aatactgcgaggaaatgccggattt

SEQ ID NO: 190240 - DNA, 25 bp, Saccharomyces pastorianus
taactacatgtgatcccgaatacta

SEQ ID NO: 190241 - DNA, 25 bp, Saccharomyces pastorianus
tcacccaatggattttcttaaaact

SEQ ID NO: 190242 - DNA, 25 bp, Saccharomyces pastorianus
cgcattagaccacccaattgtacaa

SEQ ID NO: 190243 - DNA, 25 bp, Saccharomyces pastorianus
agtatgttgctctcgcattagacca

SEQ ID NO: 190244 - DNA, 25 bp, Saccharomyces pastorianus
gggatcccgttgatatgacagtttt

SEQ ID NO: 190245 - DNA, 25 bp, Saccharomyces pastorianus
gaccggaaactctttttgctgtaca

SEQ ID NO: 190246 - DNA, 25 bp, Saccharomyces pastorianus
ttgaaccaactgaaggactggcctt

SEQ ID NO: 190247 - DNA, 25 bp, Saccharomyces pastorianus
ttgctgtacagtatgttgctctcgc

SEQ ID NO: 190248 - DNA, 25 bp, Saccharomyces pastorianus
gtgttcaaagttgcggaccccaaat

SEQ ID NO: 190249 - DNA, 25 bp, Saccharomyces pastorianus
taacgaaattcgctcctaaattgaa

SEQ ID NO: 190250 - DNA, 25 bp, Saccharomyces pastorianus
gacctcagtaccactggtctaatat

SEQ ID NO: 190251 - DNA, 25 bp, Saccharomyces pastorianus
ttctcctttataggtgacaagtggt

SEQ ID NO: 190252 - DNA, 25 bp, Saccharomyces pastorianus
gtttctgctcaattgttgtttccaa

SEQ ID NO: 190253 - DNA, 25 bp, Saccharomyces pastorianus
aaggcccaaaactacgaatgcgata

SEQ ID NO: 190254 - DNA, 25 bp, Saccharomyces pastorianus
gggctgtcatctatggttctttaat

SEQ ID NO: 190255 - DNA, 25 bp, Saccharomyces pastorianus
tctttaattttctcctttataggtg

SEQ ID NO: 190256 - DNA, 25 bp, Saccharomyces pastorianus
tattgcatttatatgaagcgagctt

SEQ ID NO: 190257 - DNA, 25 bp, Saccharomyces pastorianus
aatgcgataatgacaggtgcgctat

SEQ ID NO: 190258 - DNA, 25 bp, Saccharomyces pastorianus
aattgttgtttccaacatccaaagt

SEQ ID NO: 190259 - DNA, 25 bp, Saccharomyces pastorianus
gacaggtgcgctatttggaattggt

SEQ ID NO: 190260 - DNA, 25 bp, Saccharomyces pastorianus
cagctagggctgtcatctatggttc

SEQ ID NO: 190261 - DNA, 25 bp, Saccharomyces pastorianus
taccttatggtggtcaccaactatt

SEQ ID NO: 190262 - DNA, 25 bp, Saccharomyces pastorianus
gcaatttaagaagctaactcatgct

SEQ ID NO: 190263 - DNA, 25 bp, Saccharomyces pastorianus
ctcaaagaactggtttaagccaaat

SEQ ID NO: 190264 - DNA, 25 bp, Saccharomyces pastorianus
aactattaacagagcaaatgtctat

SEQ ID NO: 190265 - DNA, 25 bp, Saccharomyces pastorianus
atttaagaagctaactcatgctcaa

SEQ ID NO: 190266 - DNA, 25 bp, Saccharomyces pastorianus
taagaagctaactcatgctcaaaga

SEQ ID NO: 190267 - DNA, 25 bp, Saccharomyces pastorianus
tatggtggtcaccaactattaacag

SEQ ID NO: 190268 - DNA, 25 bp, Saccharomyces pastorianus
gaagctaactcatgctcaaagaact

SEQ ID NO: 190269 - DNA, 25 bp, Saccharomyces pastorianus
atgctcaaagaactggtttaagcca

SEQ ID NO: 190270 - DNA, 25 bp, Saccharomyces pastorianus
ctaactcatgctcaaagaactggtt

SEQ ID NO: 190271 - DNA, 25 bp, Saccharomyces pastorianus
gctaactcatgctcaaagaactggt

SEQ ID NO: 190272 - DNA, 25 bp, Saccharomyces pastorianus
cgtcccggagaactctataggtgtt

SEQ ID NO: 190273 - DNA, 25 bp, Saccharomyces pastorianus
gaagttctgcaaaggtgcggtaaca

SEQ ID NO: 190274 - DNA, 25 bp, Saccharomyces pastorianus
gatgaagctactatccttggatcta

SEQ ID NO: 190275 - DNA, 25 bp, Saccharomyces pastorianus
tcaatgctacgccatctgaggatga

SEQ ID NO: 190276 - DNA, 25 bp, Saccharomyces pastorianus
gaacgttgccattacaagacccaga

SEQ ID NO: 190277 - DNA, 25 bp, Saccharomyces pastorianus
aactgtagatgggttccagggccgt

SEQ ID NO: 190278 - DNA, 25 bp, Saccharomyces pastorianus
tttaaggtcattcaacgtcccggag

SEQ ID NO: 190279 - DNA, 25 bp, Saccharomyces pastorianus
gacttttgatagacctaccgaccgt

SEQ ID NO: 190280 - DNA, 25 bp, Saccharomyces pastorianus
gttatttctccataccatgcacaag

SEQ ID NO: 190281 - DNA, 25 bp, Saccharomyces pastorianus
ggcaactagttgttgttggccatat

SEQ ID NO: 190282 - DNA, 25 bp, Saccharomyces pastorianus
aacgctcgcgcacagacttttgata

SEQ ID NO: 190283 - DNA, 25 bp, Saccharomyces pastorianus
tgttgctgttgctgctgttgctgct

SEQ ID NO: 190284 - DNA, 25 bp, Saccharomyces pastorianus
ttgttgctgctgcttcgctcgtcct

SEQ ID NO: 190285 - DNA, 25 bp, Saccharomyces pastorianus
ttgctgctgctgctgttgttgttgt

SEQ ID NO: 190286 - DNA, 25 bp, Saccharomyces pastorianus
tgctgctgctgctgttgttgttgtt

SEQ ID NO: 190287 - DNA, 25 bp, Saccharomyces pastorianus
tgctgctgttgttgttgttgttgct

SEQ ID NO: 190288 - DNA, 25 bp, Saccharomyces pastorianus
gctgctgctgctgttgttgttgttg

SEQ ID NO: 190289 - DNA, 25 bp, Saccharomyces pastorianus
gttgttgctgctgcttcgctcgtcc

SEQ ID NO: 190290 - DNA, 25 bp, Saccharomyces pastorianus
ctgctgctgttgttgttgttgttgc

SEQ ID NO: 190291 - DNA, 25 bp, Saccharomyces pastorianus
ctgctgctgctgttgttgttgttgt

SEQ ID NO: 190292 - DNA, 25 bp, Saccharomyces pastorianus
gttgctgttgctgctgttgctgctg

SEQ ID NO: 190293 - DNA, 25 bp, Saccharomyces pastorianus
ttgctgttgctgctgttgctgctgc

SEQ ID NO: 190294 - DNA, 25 bp, Saccharomyces pastorianus
agagcagttcatcgtccaaaggaga

SEQ ID NO: 190295 - DNA, 25 bp, Saccharomyces pastorianus
ggtactccacaggactctagaggat

SEQ ID NO: 190296 - DNA, 25 bp, Saccharomyces pastorianus
ggcgttactttttctgctaagccag

SEQ ID NO: 190297 - DNA, 25 bp, Saccharomyces pastorianus
acggatccctaaatgaaattgtcac

SEQ ID NO: 190298 - DNA, 25 bp, Saccharomyces pastorianus
gaaagatggtactccacaggactct

SEQ ID NO: 190299 - DNA, 25 bp, Saccharomyces pastorianus
gttcatggtgcaagagcagttcatc

SEQ ID NO: 190300 - DNA, 25 bp, Saccharomyces pastorianus
tgctaagccagatccaactccgaat

SEQ ID NO: 190301 - DNA, 25 bp, Saccharomyces pastorianus
actccgaatctattacaaccttggg

SEQ ID NO: 190302 - DNA, 25 bp, Saccharomyces pastorianus
tattgctggcgttactttttctgct

SEQ ID NO: 190303 - DNA, 25 bp, Saccharomyces pastorianus
ttttgccagtatgttcatggtgcaa

SEQ ID NO: 190304 - DNA, 25 bp, Saccharomyces pastorianus
gtcacaccaacggttattgctggcg

SEQ ID NO: 190305 - DNA, 25 bp, Saccharomyces pastorianus
taagaagtttcttggagcatcaaag

SEQ ID NO: 190306 - DNA, 25 bp, Saccharomyces pastorianus
ggcagcttgttcaaagcccctacca

SEQ ID NO: 190307 - DNA, 25 bp, Saccharomyces pastorianus
aaggcaattggcagcttgttcaaag

SEQ ID NO: 190308 - DNA, 25 bp, Saccharomyces pastorianus
gaaaatcaaaccagacaaggcaatt

SEQ ID NO: 190309 - DNA, 25 bp, Saccharomyces pastorianus
attggcagcttgttcaaagccccta

SEQ ID NO: 190310 - DNA, 25 bp, Saccharomyces pastorianus
tcaaagcccctaccatcgaatatgt

SEQ ID NO: 190311 - DNA, 25 bp, Saccharomyces pastorianus
aaccagacaaggcaattggcagctt

SEQ ID NO: 190312 - DNA, 25 bp, Saccharomyces pastorianus
gcccctaccatcgaatatgtagtag

SEQ ID NO: 190313 - DNA, 25 bp, Saccharomyces pastorianus
tgttcaaagcccctaccatcgaata

SEQ ID NO: 190314 - DNA, 25 bp, Saccharomyces pastorianus
ggagcatcaaagaaaatcaaaccag

SEQ ID NO: 190315 - DNA, 25 bp, Saccharomyces pastorianus
aagcccctaccatcgaatatgtagt

SEQ ID NO: 190316 - DNA, 25 bp, Saccharomyces pastorianus
ctccctgttgttttcatggaacgaa

SEQ ID NO: 190317 - DNA, 25 bp, Saccharomyces pastorianus
ttagagatgcccatgtcgtcggagc

SEQ ID NO: 190318 - DNA, 25 bp, Saccharomyces pastorianus
tgctacaatagtgccttcgacagat

SEQ ID NO: 190319 - DNA, 25 bp, Saccharomyces pastorianus
acgtcccgcaagatctcgtggaggc

SEQ ID NO: 190320 - DNA, 25 bp, Saccharomyces pastorianus
tacttggatgaactgtcggacacct

SEQ ID NO: 190321 - DNA, 25 bp, Saccharomyces pastorianus
tcggagcctctcaacgcgatttgaa

SEQ ID NO: 190322 - DNA, 25 bp, Saccharomyces pastorianus
cgatgtcatcctaccaaaattctct

SEQ ID NO: 190323 - DNA, 25 bp, Saccharomyces pastorianus
aacactggtaggtttgcttccaagg

SEQ ID NO: 190324 - DNA, 25 bp, Saccharomyces pastorianus
gatgtatatattccaagacccttca

SEQ ID NO: 190325 - DNA, 25 bp, Saccharomyces pastorianus
aaccctgcgctcgaatttagagtct

SEQ ID NO: 190326 - DNA, 25 bp, Saccharomyces pastorianus
aatggtgtgacatcaaccctgcgct

SEQ ID NO: 190327 - DNA, 25 bp, Saccharomyces pastorianus
tgatttggtccgtgttccacgtaac

SEQ ID NO: 190328 - DNA, 25 bp, Saccharomyces pastorianus
gctcgtcggtgtcggctatcaaata

SEQ ID NO: 190329 - DNA, 25 bp, Saccharomyces pastorianus
ataagggccgtgtcggtgaatcctg

SEQ ID NO: 190330 - DNA, 25 bp, Saccharomyces pastorianus
gtgttctcgaccacattgtttattg

SEQ ID NO: 190331 - DNA, 25 bp, Saccharomyces pastorianus
gtaaccgccgtgctttggtatattc

SEQ ID NO: 190332 - DNA, 25 bp, Saccharomyces pastorianus
ggaactcagagacgttgcttcgcac

SEQ ID NO: 190333 - DNA, 25 bp, Saccharomyces pastorianus
tctccacgttggttgatgcataagg

SEQ ID NO: 190334 - DNA, 25 bp, Saccharomyces pastorianus
tgcttcgcacgacagagagttacat

SEQ ID NO: 190335 - DNA, 25 bp, Saccharomyces pastorianus
ggtaccgttcctgctattttatgga

SEQ ID NO: 190336 - DNA, 25 bp, Saccharomyces pastorianus
atttatcgttggtttggtgctcgtc

SEQ ID NO: 190337 - DNA, 25 bp, Saccharomyces pastorianus
gcagcactattaattggtaccgttc

SEQ ID NO: 190338 - DNA, 25 bp, Saccharomyces pastorianus
tcaaggtcgggtggtttttgcacac

SEQ ID NO: 190339 - DNA, 25 bp, Saccharomyces pastorianus
tgacttggtcgggttccacacgtac

SEQ ID NO: 190340 - DNA, 25 bp, Saccharomyces pastorianus
aatctacagaatcttgcccgtcaga

SEQ ID NO: 190341 - DNA, 25 bp, Saccharomyces pastorianus
aaggtcgtcctcgtacaggtcgcag

SEQ ID NO: 190342 - DNA, 25 bp, Saccharomyces pastorianus
gattacgcaagacatttcctctcct

SEQ ID NO: 190343 - DNA, 25 bp, Saccharomyces pastorianus
aaagctgcacgccatggaggtgttt

SEQ ID NO: 190344 - DNA, 25 bp, Saccharomyces pastorianus
aagtccatcccctttgaagagctga

SEQ ID NO: 190345 - DNA, 25 bp, Saccharomyces pastorianus
agaatcaacggccaattcggtaccg

SEQ ID NO: 190346 - DNA, 25 bp, Saccharomyces pastorianus
gtgtttctgagtgagcacccggagt

SEQ ID NO: 190347 - DNA, 25 bp, Saccharomyces pastorianus
agattacatcaagggtgttccgcaa

SEQ ID NO: 190348 - DNA, 25 bp, Saccharomyces pastorianus
gtacctgaggtctgtggtcaacgaa

SEQ ID NO: 190349 - DNA, 25 bp, Saccharomyces pastorianus
tattaacttctcatctagcacacta

SEQ ID NO: 190350 - DNA, 25 bp, Saccharomyces pastorianus
aagacattggcatctatctcgttag

SEQ ID NO: 190351 - DNA, 25 bp, Saccharomyces pastorianus
cggtaccagttctgcgtcaacaaat

SEQ ID NO: 190352 - DNA, 25 bp, Saccharomyces pastorianus
gtcagtgatccctaccgtgttagaa

SEQ ID NO: 190353 - DNA, 25 bp, Saccharomyces pastorianus
tgtatctgcatcagctccagcttca

SEQ ID NO: 190354 - DNA, 25 bp, Saccharomyces pastorianus
aaacgcgtcgtctactgtatctgca

SEQ ID NO: 190355 - DNA, 25 bp, Saccharomyces pastorianus
gtcattcccggtatatcgtcagtga

SEQ ID NO: 190356 - DNA, 25 bp, Saccharomyces pastorianus
atagccatgctagaggttttccaaa

SEQ ID NO: 190357 - DNA, 25 bp, Saccharomyces pastorianus
gcgtcaacaaatactccaacagcta

SEQ ID NO: 190358 - DNA, 25 bp, Saccharomyces pastorianus
gctggtgagtttaatgtcattcccg

SEQ ID NO: 190359 - DNA, 25 bp, Saccharomyces pastorianus
atgcccgtgggtccaaacgcgtcgt

SEQ ID NO: 190360 - DNA, 25 bp, Saccharomyces pastorianus
aaccggtgatctcggctggagccaa

SEQ ID NO: 190361 - DNA, 25 bp, Saccharomyces pastorianus
aacactactaatgggttccgaagat

SEQ ID NO: 190362 - DNA, 25 bp, Saccharomyces pastorianus
aagaaccggtgatctcggctggagc

SEQ ID NO: 190363 - DNA, 25 bp, Saccharomyces pastorianus
gtaacactactaatgggttccgaag

SEQ ID NO: 190364 - DNA, 25 bp, Saccharomyces pastorianus
ggtgatctcggctggagccaatgat

SEQ ID NO: 190365 - DNA, 25 bp, Saccharomyces pastorianus
cagcgctcgtagttaaattggaaga

SEQ ID NO: 190366 - DNA, 25 bp, Saccharomyces pastorianus
ctcggctggagccaatgatttagta

SEQ ID NO: 190367 - DNA, 25 bp, Saccharomyces pastorianus
gatctcggctggagccaatgattta

SEQ ID NO: 190368 - DNA, 25 bp, Saccharomyces pastorianus
gattgtagaagaaccggtgatctcg

SEQ ID NO: 190369 - DNA, 25 bp, Saccharomyces pastorianus
gatgtagcagcgctcgtagttaaat

SEQ ID NO: 190370 - DNA, 25 bp, Saccharomyces pastorianus
agcagcgctcgtagttaaattggaa

SEQ ID NO: 190371 - DNA, 25 bp, Saccharomyces pastorianus
tcttgaccgtagatggaagctttaa

SEQ ID NO: 190372 - DNA, 25 bp, Saccharomyces pastorianus
ggaggtactctatcttgaccgtaga

SEQ ID NO: 190373 - DNA, 25 bp, Saccharomyces pastorianus
ctatcttgaccgtagatggaagctt

SEQ ID NO: 190374 - DNA, 25 bp, Saccharomyces pastorianus
atgtcttggaggtactctatcttga

SEQ ID NO: 190375 - DNA, 25 bp, Saccharomyces pastorianus
gaggtactctatcttgaccgtagat

SEQ ID NO: 190376 - DNA, 25 bp, Saccharomyces pastorianus
gaccgtagatggaagctttaaaatt

SEQ ID NO: 190377 - DNA, 25 bp, Saccharomyces pastorianus
ggtactctatcttgaccgtagatgg

SEQ ID NO: 190378 - DNA, 25 bp, Saccharomyces pastorianus
tggaggtactctatcttgaccgtag

SEQ ID NO: 190379 - DNA, 25 bp, Saccharomyces pastorianus
cttggaggtactctatcttgaccgt

SEQ ID NO: 190380 - DNA, 25 bp, Saccharomyces pastorianus
gtcttggaggtactctatcttgacc

SEQ ID NO: 190381 - DNA, 25 bp, Saccharomyces pastorianus
tactctatcttgaccgtagatggaa

SEQ ID NO: 190382 - DNA, 25 bp, Saccharomyces pastorianus
ttgcaagctcaaacactactactac

SEQ ID NO: 190383 - DNA, 25 bp, Saccharomyces pastorianus
cttgaccaagccacgcaaaagagat

SEQ ID NO: 190384 - DNA, 25 bp, Saccharomyces pastorianus
ttgcccaacttggttccgaactatt

SEQ ID NO: 190385 - DNA, 25 bp, Saccharomyces pastorianus
ggtataagtacaatccgtccaacga

SEQ ID NO: 190386 - DNA, 25 bp, Saccharomyces pastorianus
ggttccgaactattcatccgatatg

SEQ ID NO: 190387 - DNA, 25 bp, Saccharomyces pastorianus
taggcctatccaccgcacgagagat

SEQ ID NO: 190388 - DNA, 25 bp, Saccharomyces pastorianus
tctgatcagaaccaggacgccttga

SEQ ID NO: 190389 - DNA, 25 bp, Saccharomyces pastorianus
atccgtccaacgacacgtatgatgt

SEQ ID NO: 190390 - DNA, 25 bp, Saccharomyces pastorianus
aaactgcacatcataggcctatcca

SEQ ID NO: 190391 - DNA, 25 bp, Saccharomyces pastorianus
aaatgatcatgcatcctctctacat

SEQ ID NO: 190392 - DNA, 25 bp, Saccharomyces pastorianus
ccagggaagtggtttgcccaacttg

SEQ ID NO: 190393 - DNA, 25 bp, Saccharomyces pastorianus
acttcatgaccaccggtaacgctct

SEQ ID NO: 190394 - DNA, 25 bp, Saccharomyces pastorianus
cgctctaggatctgtgaacatgacc

SEQ ID NO: 190395 - DNA, 25 bp, Saccharomyces pastorianus
ccaccggtaacgctctaggatctgt

SEQ ID NO: 190396 - DNA, 25 bp, Saccharomyces pastorianus
ggtaacgctctaggatctgtgaaca

SEQ ID NO: 190397 - DNA, 25 bp, Saccharomyces pastorianus
accggtaacgctctaggatctgtga

SEQ ID NO: 190398 - DNA, 25 bp, Saccharomyces pastorianus
ccggtaacgctctaggatctgtgaa

SEQ ID NO: 190399 - DNA, 25 bp, Saccharomyces pastorianus
atgaccaccggtaacgctctaggat

SEQ ID NO: 190400 - DNA, 25 bp, Saccharomyces pastorianus
gaccaccggtaacgctctaggatct

SEQ ID NO: 190401 - DNA, 25 bp, Saccharomyces pastorianus
aacgctctaggatctgtgaacatga

SEQ ID NO: 190402 - DNA, 25 bp, Saccharomyces pastorianus
tcatgaccaccggtaacgctctagg

SEQ ID NO: 190403 - DNA, 25 bp, Saccharomyces pastorianus
gtaacgctctaggatctgtgaacat

SEQ ID NO: 190404 - DNA, 25 bp, Saccharomyces pastorianus
aggattctcttgacgagttctcgca

SEQ ID NO: 190405 - DNA, 25 bp, Saccharomyces pastorianus
tgtgtcactggtttcagtttccgac

SEQ ID NO: 190406 - DNA, 25 bp, Saccharomyces pastorianus
ggcggttcgtcgtacagcaaactga

SEQ ID NO: 190407 - DNA, 25 bp, Saccharomyces pastorianus
acaagagggacatccgtcagcgcta

SEQ ID NO: 190408 - DNA, 25 bp, Saccharomyces pastorianus
agcgctagctgaggccatccgggat

SEQ ID NO: 190409 - DNA, 25 bp, Saccharomyces pastorianus
gctgcctctggccaatgacgaagtg

SEQ ID NO: 190410 - DNA, 25 bp, Saccharomyces pastorianus
aaaatttcggcgctgatcccgttga

SEQ ID NO: 190411 - DNA, 25 bp, Saccharomyces pastorianus
gaagctggactttcatgcgcaccat

SEQ ID NO: 190412 - DNA, 25 bp, Saccharomyces pastorianus
tagggtacattctggcggttcgtcg

SEQ ID NO: 190413 - DNA, 25 bp, Saccharomyces pastorianus
ttttacaacccttaagacgctgcct

SEQ ID NO: 190414 - DNA, 25 bp, Saccharomyces pastorianus
cacatgggaccatcagtcttccaaa

SEQ ID NO: 190415 - DNA, 25 bp, Saccharomyces pastorianus
cttttccattacagatagcgccgat

SEQ ID NO: 190416 - DNA, 25 bp, Saccharomyces pastorianus
ctcgttcggtttaggtcgtatcata

SEQ ID NO: 190417 - DNA, 25 bp, Saccharomyces pastorianus
gggaacaccatttggtatcaccata

SEQ ID NO: 190418 - DNA, 25 bp, Saccharomyces pastorianus
cgtatcatatactgcatcttcgacc

SEQ ID NO: 190419 - DNA, 25 bp, Saccharomyces pastorianus
gatctcgcaggctttacgtaaaaga

SEQ ID NO: 190420 - DNA, 25 bp, Saccharomyces pastorianus
ggtatcaccatagatttcgaaacta

SEQ ID NO: 190421 - DNA, 25 bp, Saccharomyces pastorianus
gcatcttcgaccattgtttccaagt

SEQ ID NO: 190422 - DNA, 25 bp, Saccharomyces pastorianus
taatgtcattgagccctcgttcggt

SEQ ID NO: 190423 - DNA, 25 bp, Saccharomyces pastorianus
gatagcgccgatcaaagtatttgtt

SEQ ID NO: 190424 - DNA, 25 bp, Saccharomyces pastorianus
gacaactttgcaacatatacgagag

SEQ ID NO: 190425 - DNA, 25 bp, Saccharomyces pastorianus
actgatgtgatttcgaccattgaca

SEQ ID NO: 190426 - DNA, 25 bp, Saccharomyces pastorianus
atgagcggtgttacagacgatatga

SEQ ID NO: 190427 - DNA, 25 bp, Saccharomyces pastorianus
gggaacaactcttagacgtatctct

SEQ ID NO: 190428 - DNA, 25 bp, Saccharomyces pastorianus
tctcctggacgttcatagagtcgcc

SEQ ID NO: 190429 - DNA, 25 bp, Saccharomyces pastorianus
gttacagacgatatgaaacaagcaa

SEQ ID NO: 190430 - DNA, 25 bp, Saccharomyces pastorianus
tggacgttcatagagtcgccgaaaa

SEQ ID NO: 190431 - DNA, 25 bp, Saccharomyces pastorianus
tagacgtatctctcctggacgttca

SEQ ID NO: 190432 - DNA, 25 bp, Saccharomyces pastorianus
tacggtcattggacctggaatcgag

SEQ ID NO: 190433 - DNA, 25 bp, Saccharomyces pastorianus
gagtcgccgaaaaatatctactaaa

SEQ ID NO: 190434 - DNA, 25 bp, Saccharomyces pastorianus
gtatctctcctggacgttcatagag

SEQ ID NO: 190435 - DNA, 25 bp, Saccharomyces pastorianus
gaaacaagcaagaagggaacaactc

SEQ ID NO: 190436 - DNA, 25 bp, Saccharomyces pastorianus
gtgagtacggtcattggacctggaa

SEQ ID NO: 190437 - DNA, 25 bp, Saccharomyces pastorianus
ctgttacccaatatcctttggcggt

SEQ ID NO: 190438 - DNA, 25 bp, Saccharomyces pastorianus
ggttatcttatcatatacttactct

SEQ ID NO: 190439 - DNA, 25 bp, Saccharomyces pastorianus
gagaggactcctaggttatcttatc

SEQ ID NO: 190440 - DNA, 25 bp, Saccharomyces pastorianus
aggagtggtcagatgagtttgataa

SEQ ID NO: 190441 - DNA, 25 bp, Saccharomyces pastorianus
ggactcctaggttatcttatcatat

SEQ ID NO: 190442 - DNA, 25 bp, Saccharomyces pastorianus
ttgaacatgacgtacggtattttct

SEQ ID NO: 190443 - DNA, 25 bp, Saccharomyces pastorianus
ccaattgaacatgacgtacggtatt

SEQ ID NO: 190444 - DNA, 25 bp, Saccharomyces pastorianus
ggtggactggtctcgttgtaccaat

SEQ ID NO: 190445 - DNA, 25 bp, Saccharomyces pastorianus
gggatgcaattgaaccaccaaagag

SEQ ID NO: 190446 - DNA, 25 bp, Saccharomyces pastorianus
actggtctcgttgtaccaattgaac

SEQ ID NO: 190447 - DNA, 25 bp, Saccharomyces pastorianus
atacttactctgttacccaatatcc

SEQ ID NO: 190448 - DNA, 25 bp, Saccharomyces pastorianus
attgggattgatccttcttctgcta

SEQ ID NO: 190449 - DNA, 25 bp, Saccharomyces pastorianus
gcaacttttgtcgttgaaccctatt

SEQ ID NO: 190450 - DNA, 25 bp, Saccharomyces pastorianus
gaaatttcacaaaggcacacgcaaa

SEQ ID NO: 190451 - DNA, 25 bp, Saccharomyces pastorianus
atttcagcagaagccatccattggt

SEQ ID NO: 190452 - DNA, 25 bp, Saccharomyces pastorianus
aagatttatccagcattcgaccaga

SEQ ID NO: 190453 - DNA, 25 bp, Saccharomyces pastorianus
agatttattaatgcgcctggtgaag

SEQ ID NO: 190454 - DNA, 25 bp, Saccharomyces pastorianus
gctcactataataacgtacgtccct

SEQ ID NO: 190455 - DNA, 25 bp, Saccharomyces pastorianus
atgtggcacaggaaaagcaactttt

SEQ ID NO: 190456 - DNA, 25 bp, Saccharomyces pastorianus
ctcttaccctttatctttagtcaat

SEQ ID NO: 190457 - DNA, 25 bp, Saccharomyces pastorianus
aaaaattttgaatctgctcactata

SEQ ID NO: 190458 - DNA, 25 bp, Saccharomyces pastorianus
cttctgctatgctttcgattgctga

SEQ ID NO: 190459 - DNA, 25 bp, Saccharomyces pastorianus
atcaaggcaccatctgtgaagagac

SEQ ID NO: 190460 - DNA, 25 bp, Saccharomyces pastorianus
caacagagctgcgactaccattttc

SEQ ID NO: 190461 - DNA, 25 bp, Saccharomyces pastorianus
gtacactgcattttctagacttaca

SEQ ID NO: 190462 - DNA, 25 bp, Saccharomyces pastorianus
tttagaggttcacatgcttgacttt

SEQ ID NO: 190463 - DNA, 25 bp, Saccharomyces pastorianus
gtgatgaaagctactgaacctcaga

SEQ ID NO: 190464 - DNA, 25 bp, Saccharomyces pastorianus
ggcaatgcttgatcctttagaggtt

SEQ ID NO: 190465 - DNA, 25 bp, Saccharomyces pastorianus
agaccgtatttcatcgtacactgca

SEQ ID NO: 190466 - DNA, 25 bp, Saccharomyces pastorianus
ggatcactatcgaatctcaaatgag

SEQ ID NO: 190467 - DNA, 25 bp, Saccharomyces pastorianus
accatttatggccttcattcactga

SEQ ID NO: 190468 - DNA, 25 bp, Saccharomyces pastorianus
ttatcgtcacaagaaaggcaatgct

SEQ ID NO: 190469 - DNA, 25 bp, Saccharomyces pastorianus
tagcaatcaggccaacagagctgcg

SEQ ID NO: 190470 - DNA, 25 bp, Saccharomyces pastorianus
agagtcattgtccattttttgtaga

SEQ ID NO: 190471 - DNA, 25 bp, Saccharomyces pastorianus
atttcatggacgtcaaacagcgtga

SEQ ID NO: 190472 - DNA, 25 bp, Saccharomyces pastorianus
gacaagcttttcatatctattcaat

SEQ ID NO: 190473 - DNA, 25 bp, Saccharomyces pastorianus
tgatggaggaaaaaccccgcaaccg

SEQ ID NO: 190474 - DNA, 25 bp, Saccharomyces pastorianus
caaccgcctaacctatgtatctatg

SEQ ID NO: 190475 - DNA, 25 bp, Saccharomyces pastorianus
caactactactgttgcttgcaagag

SEQ ID NO: 190476 - DNA, 25 bp, Saccharomyces pastorianus
acattcagcagcgaaatctctcgta

SEQ ID NO: 190477 - DNA, 25 bp, Saccharomyces pastorianus
gttgatctctttaaaccagacgacg

SEQ ID NO: 190478 - DNA, 25 bp, Saccharomyces pastorianus
gaagaaccttcttattattcaacat

SEQ ID NO: 190479 - DNA, 25 bp, Saccharomyces pastorianus
tctgaggaaccatcgacaagctttt

SEQ ID NO: 190480 - DNA, 25 bp, Saccharomyces pastorianus
ataaccgcagcaataatttcatgga

SEQ ID NO: 190481 - DNA, 25 bp, Saccharomyces pastorianus
agttgctttaacctcagggccagta

SEQ ID NO: 190482 - DNA, 25 bp, Saccharomyces pastorianus
acctcagggccagtagcaactgaag

SEQ ID NO: 190483 - DNA, 25 bp, Saccharomyces pastorianus
ttgctttaacctcagggccagtagc

SEQ ID NO: 190484 - DNA, 25 bp, Saccharomyces pastorianus
gttgctttaacctcagggccagtag

SEQ ID NO: 190485 - DNA, 25 bp, Saccharomyces pastorianus
agagttgctttaacctcagggccag

SEQ ID NO: 190486 - DNA, 25 bp, Saccharomyces pastorianus
gagttgctttaacctcagggccagt

SEQ ID NO: 190487 - DNA, 25 bp, Saccharomyces pastorianus
gccagtagcaactgaagcgaagagc

SEQ ID NO: 190488 - DNA, 25 bp, Saccharomyces pastorianus
tcagggccagtagcaactgaagcga

SEQ ID NO: 190489 - DNA, 25 bp, Saccharomyces pastorianus
gggccagtagcaactgaagcgaaga

SEQ ID NO: 190490 - DNA, 25 bp, Saccharomyces pastorianus
taacctcagggccagtagcaactga

SEQ ID NO: 190491 - DNA, 25 bp, Saccharomyces pastorianus
gctttaacctcagggccagtagcaa

SEQ ID NO: 190492 - DNA, 25 bp, Saccharomyces pastorianus
gaaggctaggctttggctggcaata

SEQ ID NO: 190493 - DNA, 25 bp, Saccharomyces pastorianus
tatttccgtcgagcactaactttgg

SEQ ID NO: 190494 - DNA, 25 bp, Saccharomyces pastorianus
gatatatgccctcgagacttcaaag

SEQ ID NO: 190495 - DNA, 25 bp, Saccharomyces pastorianus
ggacatgcatttatattctctttac

SEQ ID NO: 190496 - DNA, 25 bp, Saccharomyces pastorianus
aggcttatgctctcctggacatgca

SEQ ID NO: 190497 - DNA, 25 bp, Saccharomyces pastorianus
aaacgcatggactttgatgggtcac

SEQ ID NO: 190498 - DNA, 25 bp, Saccharomyces pastorianus
catggtttggtttgggccaggctta

SEQ ID NO: 190499 - DNA, 25 bp, Saccharomyces pastorianus
tattaccggttagcgcaactatatg

SEQ ID NO: 190500 - DNA, 25 bp, Saccharomyces pastorianus
tactacttccagaaagcttgcactt

SEQ ID NO: 190501 - DNA, 25 bp, Saccharomyces pastorianus
gcttgcactttgaaaccttgggatc

SEQ ID NO: 190502 - DNA, 25 bp, Saccharomyces pastorianus
aatagaatgctatcgtcgggctgta

SEQ ID NO: 190503 - DNA, 25 bp, Saccharomyces pastorianus
tgctactgcttctgcaaccaccact

SEQ ID NO: 190504 - DNA, 25 bp, Saccharomyces pastorianus
actgcttctgcaaccaccactctag

SEQ ID NO: 190505 - DNA, 25 bp, Saccharomyces pastorianus
tgcttctgcaaccaccactctagct

SEQ ID NO: 190506 - DNA, 25 bp, Saccharomyces pastorianus
atcgctgctactgcttctgcaacca

SEQ ID NO: 190507 - DNA, 25 bp, Saccharomyces pastorianus
aatcgctgctggtgtcgctgccatc

SEQ ID NO: 190508 - DNA, 25 bp, Saccharomyces pastorianus
cgctgccatcgctgctactgcttct

SEQ ID NO: 190509 - DNA, 25 bp, Saccharomyces pastorianus
gctgctactgcttctgcaaccacca

SEQ ID NO: 190510 - DNA, 25 bp, Saccharomyces pastorianus
tgccatcgctgctactgcttctgca

SEQ ID NO: 190511 - DNA, 25 bp, Saccharomyces pastorianus
gccatcgctgctactgcttctgcaa

SEQ ID NO: 190512 - DNA, 25 bp, Saccharomyces pastorianus
ttctgcaaccaccactctagctcaa

SEQ ID NO: 190513 - DNA, 25 bp, Saccharomyces pastorianus
tactgcttctgcaaccaccactcta

SEQ ID NO: 190514 - DNA, 25 bp, Saccharomyces pastorianus
aagctagctgatgttggtttctcaa

SEQ ID NO: 190515 - DNA, 25 bp, Saccharomyces pastorianus
tagcaaggtcttcgcctgaggataa

SEQ ID NO: 190516 - DNA, 25 bp, Saccharomyces pastorianus
taagggtcttagcaaggtcttcgcc

SEQ ID NO: 190517 - DNA, 25 bp, Saccharomyces pastorianus
ggtcactggcgatggtacgaacgat

SEQ ID NO: 190518 - DNA, 25 bp, Saccharomyces pastorianus
tttccggtacggaggttgccagaga

SEQ ID NO: 190519 - DNA, 25 bp, Saccharomyces pastorianus
gaatcctgccaaatttaagggtctt

SEQ ID NO: 190520 - DNA, 25 bp, Saccharomyces pastorianus
gatgatttctcagctattgtcaacg

SEQ ID NO: 190521 - DNA, 25 bp, Saccharomyces pastorianus
gaacgatgctccagctttaaagcta

SEQ ID NO: 190522 - DNA, 25 bp, Saccharomyces pastorianus
ctattgtcaacgctattaagtggga

SEQ ID NO: 190523 - DNA, 25 bp, Saccharomyces pastorianus
gagaggcttctgacattattttgat

SEQ ID NO: 190524 - DNA, 25 bp, Saccharomyces pastorianus
tggtttctcaatgggtatttccggt

SEQ ID NO: 190525 - DNA, 25 bp, Saccharomyces pastorianus
aacagttccacaagttcttcctcaa

SEQ ID NO: 190526 - DNA, 25 bp, Saccharomyces pastorianus
tccactggcgtatcttcactaacaa

SEQ ID NO: 190527 - DNA, 25 bp, Saccharomyces pastorianus
agagacgttagccaccatctgggac

SEQ ID NO: 190528 - DNA, 25 bp, Saccharomyces pastorianus
aattgccggatgttatccccaatga

SEQ ID NO: 190529 - DNA, 25 bp, Saccharomyces pastorianus
taagctctgctgtgttggttccatt

SEQ ID NO: 190530 - DNA, 25 bp, Saccharomyces pastorianus
atatcacgtctatctactggtgcat

SEQ ID NO: 190531 - DNA, 25 bp, Saccharomyces pastorianus
aacaggactactcctttgagtgcta

SEQ ID NO: 190532 - DNA, 25 bp, Saccharomyces pastorianus
aggatatgccacaccaagtttctgc

SEQ ID NO: 190533 - DNA, 25 bp, Saccharomyces pastorianus
agaatgctggtgtcgaattgccgga

SEQ ID NO: 190534 - DNA, 25 bp, Saccharomyces pastorianus
gaatttgctattgccatgttcctaa

SEQ ID NO: 190535 - DNA, 25 bp, Saccharomyces pastorianus
aacatgctggttcgctaagctctgc

SEQ ID NO: 190536 - DNA, 25 bp, Saccharomyces pastorianus
attccacaccatggcccattctcac

SEQ ID NO: 190537 - DNA, 25 bp, Saccharomyces pastorianus
ttcatattccacaccatggcccatt

SEQ ID NO: 190538 - DNA, 25 bp, Saccharomyces pastorianus
gttaccctactttcatattccacac

SEQ ID NO: 190539 - DNA, 25 bp, Saccharomyces pastorianus
tcatattccacaccatggcccattc

SEQ ID NO: 190540 - DNA, 25 bp, Saccharomyces pastorianus
catattccacaccatggcccattct

SEQ ID NO: 190541 - DNA, 25 bp, Saccharomyces pastorianus
acaccatggcccattctcactaaat

SEQ ID NO: 190542 - DNA, 25 bp, Saccharomyces pastorianus
tattccacaccatggcccattctca

SEQ ID NO: 190543 - DNA, 25 bp, Saccharomyces pastorianus
cactctcaagttaccctactttcat

SEQ ID NO: 190544 - DNA, 25 bp, Saccharomyces pastorianus
agttaccctactttcatattccaca

SEQ ID NO: 190545 - DNA, 25 bp, Saccharomyces pastorianus
tccacaccatggcccattctcacta

SEQ ID NO: 190546 - DNA, 25 bp, Saccharomyces pastorianus
atattccacaccatggcccattctc

SEQ ID NO: 190547 - DNA, 25 bp, Saccharomyces pastorianus
gtgctatcgtttgaatctccaccct

SEQ ID NO: 190548 - DNA, 25 bp, Saccharomyces pastorianus
gattatcgtgttcaaaactgttgtt

SEQ ID NO: 190549 - DNA, 25 bp, Saccharomyces pastorianus
gcatttccagaatcagagtcggtat

SEQ ID NO: 190550 - DNA, 25 bp, Saccharomyces pastorianus
gtctttttcaagattatcgtgttca

SEQ ID NO: 190551 - DNA, 25 bp, Saccharomyces pastorianus
ttactatcgtcttcatcttgctgtt

SEQ ID NO: 190552 - DNA, 25 bp, Saccharomyces pastorianus
gtgcaatgcttttcgatgtcttttt

SEQ ID NO: 190553 - DNA, 25 bp, Saccharomyces pastorianus
aacccattgacctcgttactatcgt

SEQ ID NO: 190554 - DNA, 25 bp, Saccharomyces pastorianus
aaactgttgtttttcgtgctatcgt

SEQ ID NO: 190555 - DNA, 25 bp, Saccharomyces pastorianus
gtatcggatgatatggtgcaatgct

SEQ ID NO: 190556 - DNA, 25 bp, Saccharomyces pastorianus
accattatcctcatttccactggtt

SEQ ID NO: 190557 - DNA, 25 bp, Saccharomyces pastorianus
gtcatttttggctttagcatttcca

SEQ ID NO: 190558 - DNA, 25 bp, Saccharomyces pastorianus
aacggcgtaacaaggatggctaact

SEQ ID NO: 190559 - DNA, 25 bp, Saccharomyces pastorianus
atttgcaggcagtagttcccacaat

SEQ ID NO: 190560 - DNA, 25 bp, Saccharomyces pastorianus
gttcccacaatggagtactcacggc

SEQ ID NO: 190561 - DNA, 25 bp, Saccharomyces pastorianus
gacgtgcttccggaatttgcaggca

SEQ ID NO: 190562 - DNA, 25 bp, Saccharomyces pastorianus
ttaagccaggaaagcgtctcaacga

SEQ ID NO: 190563 - DNA, 25 bp, Saccharomyces pastorianus
gaaattgcaatcctctaatgaagct

SEQ ID NO: 190564 - DNA, 25 bp, Saccharomyces pastorianus
atcaagtctctcaagcaaattacag

SEQ ID NO: 190565 - DNA, 25 bp, Saccharomyces pastorianus
gaactttactttggaactaagcgag

SEQ ID NO: 190566 - DNA, 25 bp, Saccharomyces pastorianus
caaagcggttttcgatttcgagtat

SEQ ID NO: 190567 - DNA, 25 bp, Saccharomyces pastorianus
gaaagcgtctcaacgaacggcgtaa

SEQ ID NO: 190568 - DNA, 25 bp, Saccharomyces pastorianus
tactcacggcgaattcatcaaagga

SEQ ID NO: 190569 - DNA, 25 bp, Saccharomyces pastorianus
actgctgcaatactttctgcggctg

SEQ ID NO: 190570 - DNA, 25 bp, Saccharomyces pastorianus
cgtgtcgctgtcctcatcactgctg

SEQ ID NO: 190571 - DNA, 25 bp, Saccharomyces pastorianus
gtcgctgtcctcatcactgctgcaa

SEQ ID NO: 190572 - DNA, 25 bp, Saccharomyces pastorianus
acgtgtcgctgtcctcatcactgct

SEQ ID NO: 190573 - DNA, 25 bp, Saccharomyces pastorianus
atgcacgtgtcgctgtcctcatcac

SEQ ID NO: 190574 - DNA, 25 bp, Saccharomyces pastorianus
tgcacgtgtcgctgtcctcatcact

SEQ ID NO: 190575 - DNA, 25 bp, Saccharomyces pastorianus
atgaatgcacgtgtcgctgtcctca

SEQ ID NO: 190576 - DNA, 25 bp, Saccharomyces pastorianus
ctgctgcaatactttctgcggctgt

SEQ ID NO: 190577 - DNA, 25 bp, Saccharomyces pastorianus
tgctgcaatactttctgcggctgtc

SEQ ID NO: 190578 - DNA, 25 bp, Saccharomyces pastorianus
tgaatgcacgtgtcgctgtcctcat

SEQ ID NO: 190579 - DNA, 25 bp, Saccharomyces pastorianus
gaatgcacgtgtcgctgtcctcatc

SEQ ID NO: 190580 - DNA, 25 bp, Saccharomyces pastorianus
ctccttccgttcattatgtttcatt

SEQ ID NO: 190581 - DNA, 25 bp, Saccharomyces pastorianus
atggaaatcctcaaaaaggaatcgg

SEQ ID NO: 190582 - DNA, 25 bp, Saccharomyces pastorianus
tggaaatcctcaaaaaggaatcggt

SEQ ID NO: 190583 - DNA, 25 bp, Saccharomyces pastorianus
gttcttctcgaggatatggaaatcc

SEQ ID NO: 190584 - DNA, 25 bp, Saccharomyces pastorianus
ttactacaagttcttctcgaggata

SEQ ID NO: 190585 - DNA, 25 bp, Saccharomyces pastorianus
ttccgttcattatgtttcattatcc

SEQ ID NO: 190586 - DNA, 25 bp, Saccharomyces pastorianus
tttctccttccgttcattatgtttc

SEQ ID NO: 190587 - DNA, 25 bp, Saccharomyces pastorianus
tcgaggatatggaaatcctcaaaaa

SEQ ID NO: 190588 - DNA, 25 bp, Saccharomyces pastorianus
ggatatggaaatcctcaaaaaggaa

SEQ ID NO: 190589 - DNA, 25 bp, Saccharomyces pastorianus
aggatatggaaatcctcaaaaagga

SEQ ID NO: 190590 - DNA, 25 bp, Saccharomyces pastorianus
tctccttccgttcattatgtttcat

SEQ ID NO: 190591 - DNA, 25 bp, Saccharomyces pastorianus
acctcagattacgtgttttattttg

SEQ ID NO: 190592 - DNA, 25 bp, Saccharomyces pastorianus
ttgacggactcacctcagattacgt

SEQ ID NO: 190593 - DNA, 25 bp, Saccharomyces pastorianus
gtgttttattttgtcactgtgctaa

SEQ ID NO: 190594 - DNA, 25 bp, Saccharomyces pastorianus
cacctcagattacgtgttttatttt

SEQ ID NO: 190595 - DNA, 25 bp, Saccharomyces pastorianus
ctcagattacgtgttttattttgtc

SEQ ID NO: 190596 - DNA, 25 bp, Saccharomyces pastorianus
gattacgtgttttattttgtcactg

SEQ ID NO: 190597 - DNA, 25 bp, Saccharomyces pastorianus
cctcagattacgtgttttattttgt

SEQ ID NO: 190598 - DNA, 25 bp, Saccharomyces pastorianus
cagttatgacgcttttaatcatgat

SEQ ID NO: 190599 - DNA, 25 bp, Saccharomyces pastorianus
cttgacggactcacctcagattacg

SEQ ID NO: 190600 - DNA, 25 bp, Saccharomyces pastorianus
attttgtcactgtgctaaggcaaat

SEQ ID NO: 190601 - DNA, 25 bp, Saccharomyces pastorianus
aagtcgctgttgcaattgacgagct

SEQ ID NO: 190602 - DNA, 25 bp, Saccharomyces pastorianus
ctcaatttatatacacttatgccaa

SEQ ID NO: 190603 - DNA, 25 bp, Saccharomyces pastorianus
ttatgccaatataaccaaaaaatta

SEQ ID NO: 190604 - DNA, 25 bp, Saccharomyces pastorianus
taccacttttacaccatatactaac

SEQ ID NO: 190605 - DNA, 25 bp, Saccharomyces pastorianus
acttttacaccatatactaaccact

SEQ ID NO: 190606 - DNA, 25 bp, Saccharomyces pastorianus
cttatgccaatataaccaaaaaatt

SEQ ID NO: 190607 - DNA, 25 bp, Saccharomyces pastorianus
atacgttataccacttttacaccat

SEQ ID NO: 190608 - DNA, 25 bp, Saccharomyces pastorianus
ataccacttttacaccatatactaa

SEQ ID NO: 190609 - DNA, 25 bp, Saccharomyces pastorianus
attaccactaaaatcacctaaacat

SEQ ID NO: 190610 - DNA, 25 bp, Saccharomyces pastorianus
tgccaatataaccaaaaaattacca

SEQ ID NO: 190611 - DNA, 25 bp, Saccharomyces pastorianus
tatgccaatataaccaaaaaattac

SEQ ID NO: 190612 - DNA, 25 bp, Saccharomyces pastorianus
acgttataccacttttacaccatat

SEQ ID NO: 190613 - DNA, 25 bp, Saccharomyces pastorianus
gaacatattcgcagaaactccatca

SEQ ID NO: 190614 - DNA, 25 bp, Saccharomyces pastorianus
ggcgtagacacatcatttctcaaat

SEQ ID NO: 190615 - DNA, 25 bp, Saccharomyces pastorianus
attgtgggcgagtatgctacccttc

SEQ ID NO: 190616 - DNA, 25 bp, Saccharomyces pastorianus
aacaatacacgattcaccctatcat

SEQ ID NO: 190617 - DNA, 25 bp, Saccharomyces pastorianus
attgtttactttgatcgactttgaa

SEQ ID NO: 190618 - DNA, 25 bp, Saccharomyces pastorianus
tcttccgctgttttatcaggattcg

SEQ ID NO: 190619 - DNA, 25 bp, Saccharomyces pastorianus
gggctatagcaccatcttcgtctat

SEQ ID NO: 190620 - DNA, 25 bp, Saccharomyces pastorianus
atatgacctcgctaactgtgcacgt

SEQ ID NO: 190621 - DNA, 25 bp, Saccharomyces pastorianus
tcccactttgcctgatactatagat

SEQ ID NO: 190622 - DNA, 25 bp, Saccharomyces pastorianus
tgctacccttctggagaccacaaat

SEQ ID NO: 190623 - DNA, 25 bp, Saccharomyces pastorianus
gaataggccttaaagatccggtgat

SEQ ID NO: 190624 - DNA, 25 bp, Saccharomyces pastorianus
gtacacttgattttctatttaggaa

SEQ ID NO: 190625 - DNA, 25 bp, Saccharomyces pastorianus
atttaggaatctctgtttgcataag

SEQ ID NO: 190626 - DNA, 25 bp, Saccharomyces pastorianus
tctgtttgcataagagctgctctta

SEQ ID NO: 190627 - DNA, 25 bp, Saccharomyces pastorianus
agagctgctcttatgtttggggaca

SEQ ID NO: 190628 - DNA, 25 bp, Saccharomyces pastorianus
gatttatgatacatgtacacttgat

SEQ ID NO: 190629 - DNA, 25 bp, Saccharomyces pastorianus
taggaatctctgtttgcataagagc

SEQ ID NO: 190630 - DNA, 25 bp, Saccharomyces pastorianus
catgtacacttgattttctatttag

SEQ ID NO: 190631 - DNA, 25 bp, Saccharomyces pastorianus
tctctgtttgcataagagctgctct

SEQ ID NO: 190632 - DNA, 25 bp, Saccharomyces pastorianus
gaatctctgtttgcataagagctgc

SEQ ID NO: 190633 - DNA, 25 bp, Saccharomyces pastorianus
tctatttaggaatctctgtttgcat

SEQ ID NO: 190634 - DNA, 25 bp, Saccharomyces pastorianus
tttctatttaggaatctctgtttgc

SEQ ID NO: 190635 - DNA, 25 bp, Saccharomyces pastorianus
gcccatcggtctattttggcaagca

SEQ ID NO: 190636 - DNA, 25 bp, Saccharomyces pastorianus
gtgggtgctttcttctatctatata

SEQ ID NO: 190637 - DNA, 25 bp, Saccharomyces pastorianus
gaagcatatgctgtcatctaccgtg

SEQ ID NO: 190638 - DNA, 25 bp, Saccharomyces pastorianus
gtatctgggttaccattcatcggca

SEQ ID NO: 190639 - DNA, 25 bp, Saccharomyces pastorianus
gtatttctctacatgttatccaccc

SEQ ID NO: 190640 - DNA, 25 bp, Saccharomyces pastorianus
tggttctgtagcattgcccatcggt

SEQ ID NO: 190641 - DNA, 25 bp, Saccharomyces pastorianus
attcatcggcattggtgtcggttta

SEQ ID NO: 190642 - DNA, 25 bp, Saccharomyces pastorianus
tatgtcatgagtagtgtcttcccac

SEQ ID NO: 190643 - DNA, 25 bp, Saccharomyces pastorianus
tacgtcgctttcatttttgccattt

SEQ ID NO: 190644 - DNA, 25 bp, Saccharomyces pastorianus
tggacggccagaccagatgttcact

SEQ ID NO: 190645 - DNA, 25 bp, Saccharomyces pastorianus
ttgcttcctgtttggccgctaacaa

SEQ ID NO: 190646 - DNA, 25 bp, Saccharomyces pastorianus
tcttctcgactagattattccttta

SEQ ID NO: 190647 - DNA, 25 bp, Saccharomyces pastorianus
cataagttcttgctgggatggagat

SEQ ID NO: 190648 - DNA, 25 bp, Saccharomyces pastorianus
aaccccaatctagttctctacataa

SEQ ID NO: 190649 - DNA, 25 bp, Saccharomyces pastorianus
ggacgtcttcattgagggtgttgat

SEQ ID NO: 190650 - DNA, 25 bp, Saccharomyces pastorianus
gagagtctacaaatcaaattcgaat

SEQ ID NO: 190651 - DNA, 25 bp, Saccharomyces pastorianus
gaatctaattttgtcatcgcatcat

SEQ ID NO: 190652 - DNA, 25 bp, Saccharomyces pastorianus
agaatttcaacacttcaaccccaat

SEQ ID NO: 190653 - DNA, 25 bp, Saccharomyces pastorianus
ttattcctttatagtctttgacata

SEQ ID NO: 190654 - DNA, 25 bp, Saccharomyces pastorianus
tctcagtttgatagtaacgccaaaa

SEQ ID NO: 190655 - DNA, 25 bp, Saccharomyces pastorianus
aataaacttatatcttctcgactag

SEQ ID NO: 190656 - DNA, 25 bp, Saccharomyces pastorianus
gacatattttatttggccgtatact

SEQ ID NO: 190657 - DNA, 25 bp, Saccharomyces pastorianus
aacgccacttcaaacgccaatacgg

SEQ ID NO: 190658 - DNA, 25 bp, Saccharomyces pastorianus
agccgccatgtttgcagctttacaa

SEQ ID NO: 190659 - DNA, 25 bp, Saccharomyces pastorianus
ggtattctacgaaagagccgccatg

SEQ ID NO: 190660 - DNA, 25 bp, Saccharomyces pastorianus
gccaataacaacaacgccacttcaa

SEQ ID NO: 190661 - DNA, 25 bp, Saccharomyces pastorianus
agcaacgttctcaagctttgcaaca

SEQ ID NO: 190662 - DNA, 25 bp, Saccharomyces pastorianus
gctgctgccgccaataacaacaacg

SEQ ID NO: 190663 - DNA, 25 bp, Saccharomyces pastorianus
acttcaaacgccaatacggtattct

SEQ ID NO: 190664 - DNA, 25 bp, Saccharomyces pastorianus
aaaagcaacagcaacgttctcaagc

SEQ ID NO: 190665 - DNA, 25 bp, Saccharomyces pastorianus
gccatgtttgcagctttacaacaaa

SEQ ID NO: 190666 - DNA, 25 bp, Saccharomyces pastorianus
aacaacaatgctgctgccgccaata

SEQ ID NO: 190667 - DNA, 25 bp, Saccharomyces pastorianus
gaaagagccgccatgtttgcagctt

SEQ ID NO: 190668 - DNA, 25 bp, Saccharomyces pastorianus
cgaacacctatgaagaacacatctt

SEQ ID NO: 190669 - DNA, 25 bp, Saccharomyces pastorianus
gacgatctggtactacgaacaccta

SEQ ID NO: 190670 - DNA, 25 bp, Saccharomyces pastorianus
agaacacatcttacaacccgtactt

SEQ ID NO: 190671 - DNA, 25 bp, Saccharomyces pastorianus
gcgctctaagcatgaaaatggtgaa

SEQ ID NO: 190672 - DNA, 25 bp, Saccharomyces pastorianus
tacaacccgtacttgttagtacaag

SEQ ID NO: 190673 - DNA, 25 bp, Saccharomyces pastorianus
tgaatgacggtatctctgttagacg

SEQ ID NO: 190674 - DNA, 25 bp, Saccharomyces pastorianus
gtgcaattaccttagcgtctgaatg

SEQ ID NO: 190675 - DNA, 25 bp, Saccharomyces pastorianus
tctctgttagacgatctggtactac

SEQ ID NO: 190676 - DNA, 25 bp, Saccharomyces pastorianus
gtacaagtgcaattaccttagcgtc

SEQ ID NO: 190677 - DNA, 25 bp, Saccharomyces pastorianus
tggtgaattgaatgacggtatctct

SEQ ID NO: 190678 - DNA, 25 bp, Saccharomyces pastorianus
agcgtctgaatgtgttaaatccatc

SEQ ID NO: 190679 - DNA, 25 bp, Saccharomyces pastorianus
gtagccccattgaccgacagatata

SEQ ID NO: 190680 - DNA, 25 bp, Saccharomyces pastorianus
tcaaaagatcgtagccccattgacc

SEQ ID NO: 190681 - DNA, 25 bp, Saccharomyces pastorianus
atgaaattagagcttccgtcaatga

SEQ ID NO: 190682 - DNA, 25 bp, Saccharomyces pastorianus
ccccattgaccgacagatatatcct

SEQ ID NO: 190683 - DNA, 25 bp, Saccharomyces pastorianus
agatcgtagccccattgaccgacag

SEQ ID NO: 190684 - DNA, 25 bp, Saccharomyces pastorianus
atatcctaagagatgttagcaagac

SEQ ID NO: 190685 - DNA, 25 bp, Saccharomyces pastorianus
gaccgacagatatatcctaagagat

SEQ ID NO: 190686 - DNA, 25 bp, Saccharomyces pastorianus
tctatcaaaagatcgtagccccatt

SEQ ID NO: 190687 - DNA, 25 bp, Saccharomyces pastorianus
tagccccattgaccgacagatatat

SEQ ID NO: 190688 - DNA, 25 bp, Saccharomyces pastorianus
attgaccgacagatatatcctaaga

SEQ ID NO: 190689 - DNA, 25 bp, Saccharomyces pastorianus
aggatgaaattagagcttccgtcaa

SEQ ID NO: 190690 - DNA, 25 bp, Saccharomyces pastorianus
aaaacaccggacattaacgattgca

SEQ ID NO: 190691 - DNA, 25 bp, Saccharomyces pastorianus
caccggacattaacgattgcagcac

SEQ ID NO: 190692 - DNA, 25 bp, Saccharomyces pastorianus
atggtcacccattacattactcggc

SEQ ID NO: 190693 - DNA, 25 bp, Saccharomyces pastorianus
tcacccattacattactcggccagg

SEQ ID NO: 190694 - DNA, 25 bp, Saccharomyces pastorianus
ggacattaacgattgcagcacctga

SEQ ID NO: 190695 - DNA, 25 bp, Saccharomyces pastorianus
ttacattactcggccaggctcttac

SEQ ID NO: 190696 - DNA, 25 bp, Saccharomyces pastorianus
cattacattactcggccaggctctt

SEQ ID NO: 190697 - DNA, 25 bp, Saccharomyces pastorianus
ggtcacccattacattactcggcca

SEQ ID NO: 190698 - DNA, 25 bp, Saccharomyces pastorianus
aacaccggacattaacgattgcagc

SEQ ID NO: 190699 - DNA, 25 bp, Saccharomyces pastorianus
acccattacattactcggccaggct

SEQ ID NO: 190700 - DNA, 25 bp, Saccharomyces pastorianus
accggacattaacgattgcagcacc

SEQ ID NO: 190701 - DNA, 25 bp, Saccharomyces pastorianus
tacgttactagtatattatcatata

SEQ ID NO: 190702 - DNA, 25 bp, Saccharomyces pastorianus
ttacgttactagtatattatcatat

SEQ ID NO: 190703 - DNA, 25 bp, Saccharomyces pastorianus
tagtatttacgttactagtatatta

SEQ ID NO: 190704 - DNA, 25 bp, Saccharomyces pastorianus
atttacgttactagtatattatcat

SEQ ID NO: 190705 - DNA, 25 bp, Saccharomyces pastorianus
cgttactagtatattatcatatacg

SEQ ID NO: 190706 - DNA, 25 bp, Saccharomyces pastorianus
tatttacgttactagtatattatca

SEQ ID NO: 190707 - DNA, 25 bp, Saccharomyces pastorianus
tttacgttactagtatattatcata

SEQ ID NO: 190708 - DNA, 25 bp, Saccharomyces pastorianus
acgttactagtatattatcatatac

SEQ ID NO: 190709 - DNA, 25 bp, Saccharomyces pastorianus
agtatttacgttactagtatattat

SEQ ID NO: 190710 - DNA, 25 bp, Saccharomyces pastorianus
ctatcatctactaactagtatttac

SEQ ID NO: 190711 - DNA, 25 bp, Saccharomyces pastorianus
gtatttacgttactagtatattatc

SEQ ID NO: 190712 - DNA, 25 bp, Saccharomyces pastorianus
gaggattttagcattttacaaccca

SEQ ID NO: 190713 - DNA, 25 bp, Saccharomyces pastorianus
gtttcacagcctggtacctgtacaa

SEQ ID NO: 190714 - DNA, 25 bp, Saccharomyces pastorianus
gattatctcgctgtaagtgcaccac

SEQ ID NO: 190715 - DNA, 25 bp, Saccharomyces pastorianus
ttatcaaccttgacgggtaccctat

SEQ ID NO: 190716 - DNA, 25 bp, Saccharomyces pastorianus
aattgcaacatttatcccaggatct

SEQ ID NO: 190717 - DNA, 25 bp, Saccharomyces pastorianus
gtcaagcccaagttatggtgccaac

SEQ ID NO: 190718 - DNA, 25 bp, Saccharomyces pastorianus
tataccatttcagcatttcggcgca

SEQ ID NO: 190719 - DNA, 25 bp, Saccharomyces pastorianus
ttcctgatttggtggtgtcaagccc

SEQ ID NO: 190720 - DNA, 25 bp, Saccharomyces pastorianus
gtgatgttgactacctactcgtttc

SEQ ID NO: 190721 - DNA, 25 bp, Saccharomyces pastorianus
gcatttcggcgcaacaattcagata

SEQ ID NO: 190722 - DNA, 25 bp, Saccharomyces pastorianus
gagaccaccgaagaagcacatcagt

SEQ ID NO: 190723 - DNA, 25 bp, Saccharomyces pastorianus
aaggccgctgcgtatatttctgcta

SEQ ID NO: 190724 - DNA, 25 bp, Saccharomyces pastorianus
tacaacaaatttcgagcctccgaga

SEQ ID NO: 190725 - DNA, 25 bp, Saccharomyces pastorianus
gaagatggacctcgttttttagcct

SEQ ID NO: 190726 - DNA, 25 bp, Saccharomyces pastorianus
tttaattgtcactaatgccgctggt

SEQ ID NO: 190727 - DNA, 25 bp, Saccharomyces pastorianus
tgttcggatctatgaatggttcacc

SEQ ID NO: 190728 - DNA, 25 bp, Saccharomyces pastorianus
aggccactgcatgaaggtacttata

SEQ ID NO: 190729 - DNA, 25 bp, Saccharomyces pastorianus
atttaaatatccctggccttgctgg

SEQ ID NO: 190730 - DNA, 25 bp, Saccharomyces pastorianus
gagtgcttaaccacatgggtcatgt

SEQ ID NO: 190731 - DNA, 25 bp, Saccharomyces pastorianus
gagcctccgagaactttgattatat

SEQ ID NO: 190732 - DNA, 25 bp, Saccharomyces pastorianus
ggtggaatatctaccaagctgtcta

SEQ ID NO: 190733 - DNA, 25 bp, Saccharomyces pastorianus
gtaacagtcccataccaagacatcc

SEQ ID NO: 190734 - DNA, 25 bp, Saccharomyces pastorianus
aaggcagttgccgatgtcattcgaa

SEQ ID NO: 190735 - DNA, 25 bp, Saccharomyces pastorianus
gatggccacgctattttaagggaaa

SEQ ID NO: 190736 - DNA, 25 bp, Saccharomyces pastorianus
gagattttagctcagtgtgcacctt

SEQ ID NO: 190737 - DNA, 25 bp, Saccharomyces pastorianus
aacagttattattctagctggtgag

SEQ ID NO: 190738 - DNA, 25 bp, Saccharomyces pastorianus
ttgactaacgatggccacgctattt

SEQ ID NO: 190739 - DNA, 25 bp, Saccharomyces pastorianus
gtcattcgaacttgcttaggtccaa

SEQ ID NO: 190740 - DNA, 25 bp, Saccharomyces pastorianus
tttagctcagtgtgcaccttatttg

SEQ ID NO: 190741 - DNA, 25 bp, Saccharomyces pastorianus
aaatctccaatatcactgctgcaaa

SEQ ID NO: 190742 - DNA, 25 bp, Saccharomyces pastorianus
tattggatcctatgggcggtcttgt

SEQ ID NO: 190743 - DNA, 25 bp, Saccharomyces pastorianus
tggtgacgggactacaacagttatt

SEQ ID NO: 190744 - DNA, 25 bp, Saccharomyces pastorianus
atcactgctgcaaaggcagttgccg

SEQ ID NO: 190745 - DNA, 25 bp, Saccharomyces pastorianus
caccttaatacgcttttttcaatgt

SEQ ID NO: 190746 - DNA, 25 bp, Saccharomyces pastorianus
ggtttgcaagatatcctggactttt

SEQ ID NO: 190747 - DNA, 25 bp, Saccharomyces pastorianus
aacaaaaccgcatcacctttggcag

SEQ ID NO: 190748 - DNA, 25 bp, Saccharomyces pastorianus
atttacgtgaaactccatcctcttg

SEQ ID NO: 190749 - DNA, 25 bp, Saccharomyces pastorianus
gcaacatggtagaggctgcccaaaa

SEQ ID NO: 190750 - DNA, 25 bp, Saccharomyces pastorianus
aatcatacctttcatttttcatcgg

SEQ ID NO: 190751 - DNA, 25 bp, Saccharomyces pastorianus
tggttcgcacttgcaacatggtaga

SEQ ID NO: 190752 - DNA, 25 bp, Saccharomyces pastorianus
aactccatcctcttgtcaaactttg

SEQ ID NO: 190753 - DNA, 25 bp, Saccharomyces pastorianus
tacgcttttttcaatgtcgtttaca

SEQ ID NO: 190754 - DNA, 25 bp, Saccharomyces pastorianus
tagaggctgcccaaaaacaaaaccg

SEQ ID NO: 190755 - DNA, 25 bp, Saccharomyces pastorianus
gccacagtatggttcgcacttgcaa

SEQ ID NO: 190756 - DNA, 25 bp, Saccharomyces pastorianus
cagcgattgaagttaatttgaccat

SEQ ID NO: 190757 - DNA, 25 bp, Saccharomyces pastorianus
gctgatgtaatcttaacaagaaata

SEQ ID NO: 190758 - DNA, 25 bp, Saccharomyces pastorianus
gatgtaatcttaacaagaaatagtg

SEQ ID NO: 190759 - DNA, 25 bp, Saccharomyces pastorianus
tagtgctgatgtaatcttaacaaga

SEQ ID NO: 190760 - DNA, 25 bp, Saccharomyces pastorianus
tgctgatgtaatcttaacaagaaat

SEQ ID NO: 190761 - DNA, 25 bp, Saccharomyces pastorianus
ctgatgtaatcttaacaagaaatag

SEQ ID NO: 190762 - DNA, 25 bp, Saccharomyces pastorianus
ttagtgctgatgtaatcttaacaag

SEQ ID NO: 190763 - DNA, 25 bp, Saccharomyces pastorianus
ccagcagcgattgaagttaatttga

SEQ ID NO: 190764 - DNA, 25 bp, Saccharomyces pastorianus
agtgctgatgtaatcttaacaagaa

SEQ ID NO: 190765 - DNA, 25 bp, Saccharomyces pastorianus
gtgctgatgtaatcttaacaagaaa

SEQ ID NO: 190766 - DNA, 25 bp, Saccharomyces pastorianus
gttagtgctgatgtaatcttaacaa

SEQ ID NO: 190767 - DNA, 25 bp, Saccharomyces pastorianus
tacatttctatcttggtgggcgtca

SEQ ID NO: 190768 - DNA, 25 bp, Saccharomyces pastorianus
gtagcgttctcatcttataccaact

SEQ ID NO: 190769 - DNA, 25 bp, Saccharomyces pastorianus
tacaatttaggaattgccccggtcg

SEQ ID NO: 190770 - DNA, 25 bp, Saccharomyces pastorianus
ggtcagtatcatatgtagcgttctc

SEQ ID NO: 190771 - DNA, 25 bp, Saccharomyces pastorianus
taatctgggctgtggttgacctacc

SEQ ID NO: 190772 - DNA, 25 bp, Saccharomyces pastorianus
gctcaagtacgcacggttccaaaat

SEQ ID NO: 190773 - DNA, 25 bp, Saccharomyces pastorianus
gggtgtcttatgcttttgtacttta

SEQ ID NO: 190774 - DNA, 25 bp, Saccharomyces pastorianus
ctgaaatgtccttcacttttagtat

SEQ ID NO: 190775 - DNA, 25 bp, Saccharomyces pastorianus
taaagacgtctctcataacgacccc

SEQ ID NO: 190776 - DNA, 25 bp, Saccharomyces pastorianus
tactgtctcggtatttgtgctacat

SEQ ID NO: 190777 - DNA, 25 bp, Saccharomyces pastorianus
ggactagccttccaaaccattgttt

SEQ ID NO: 190778 - DNA, 25 bp, Saccharomyces pastorianus
tagtatttacgttactagtatatta

SEQ ID NO: 190779 - DNA, 25 bp, Saccharomyces pastorianus
actgttggaataaaaatcaactatc

SEQ ID NO: 190780 - DNA, 25 bp, Saccharomyces pastorianus
ctgttggaataaaaatcaactatca

SEQ ID NO: 190781 - DNA, 25 bp, Saccharomyces pastorianus
tgactgttggaataaaaatcaacta

SEQ ID NO: 190782 - DNA, 25 bp, Saccharomyces pastorianus
atgactgttggaataaaaatcaact

SEQ ID NO: 190783 - DNA, 25 bp, Saccharomyces pastorianus
tggaataaaaatcaactatcatcta

SEQ ID NO: 190784 - DNA, 25 bp, Saccharomyces pastorianus
tatttacgttactagtatattatca

SEQ ID NO: 190785 - DNA, 25 bp, Saccharomyces pastorianus
gactgttggaataaaaatcaactat

SEQ ID NO: 190786 - DNA, 25 bp, Saccharomyces pastorianus
agtatttacgttactagtatattat

SEQ ID NO: 190787 - DNA, 25 bp, Saccharomyces pastorianus
ctatcatctactaactagtatttac

SEQ ID NO: 190788 - DNA, 25 bp, Saccharomyces pastorianus
gtatttacgttactagtatattatc

SEQ ID NO: 190789 - DNA, 25 bp, Saccharomyces pastorianus
tgatcattaccgctggtaagagtac

SEQ ID NO: 190790 - DNA, 25 bp, Saccharomyces pastorianus
cattaccgctggtaagagtaccgtt

SEQ ID NO: 190791 - DNA, 25 bp, Saccharomyces pastorianus
taccgctggtaagagtaccgttaga

SEQ ID NO: 190792 - DNA, 25 bp, Saccharomyces pastorianus
ccgctggtaagagtaccgttagatt

SEQ ID NO: 190793 - DNA, 25 bp, Saccharomyces pastorianus
atcattaccgctggtaagagtaccg

SEQ ID NO: 190794 - DNA, 25 bp, Saccharomyces pastorianus
cgctggtaagagtaccgttagattt

SEQ ID NO: 190795 - DNA, 25 bp, Saccharomyces pastorianus
ttaccgctggtaagagtaccgttag

SEQ ID NO: 190796 - DNA, 25 bp, Saccharomyces pastorianus
tcattaccgctggtaagagtaccgt

SEQ ID NO: 190797 - DNA, 25 bp, Saccharomyces pastorianus
gagtaccgttagatttgttcccgca

SEQ ID NO: 190798 - DNA, 25 bp, Saccharomyces pastorianus
gatcattaccgctggtaagagtacc

SEQ ID NO: 190799 - DNA, 25 bp, Saccharomyces pastorianus
accgctggtaagagtaccgttagat

SEQ ID NO: 190800 - DNA, 25 bp, Saccharomyces pastorianus
actgccagcatcaactccagcacta

SEQ ID NO: 190801 - DNA, 25 bp, Saccharomyces pastorianus
aggactagtgggactaccactgcca

SEQ ID NO: 190802 - DNA, 25 bp, Saccharomyces pastorianus
gtgggactaccactgccagcatcaa

SEQ ID NO: 190803 - DNA, 25 bp, Saccharomyces pastorianus
catcaacgtcaggactaatgctact

SEQ ID NO: 190804 - DNA, 25 bp, Saccharomyces pastorianus
ctgccagcatcaacgtcaggactaa

SEQ ID NO: 190805 - DNA, 25 bp, Saccharomyces pastorianus
ctgccagcatcaactccagcactaa

SEQ ID NO: 190806 - DNA, 25 bp, Saccharomyces pastorianus
gccagcatcaacgtcaggactaatg

SEQ ID NO: 190807 - DNA, 25 bp, Saccharomyces pastorianus
tgccagcatcaacgtcaggactaat

SEQ ID NO: 190808 - DNA, 25 bp, Saccharomyces pastorianus
ggactagtgggactaccactgccag

SEQ ID NO: 190809 - DNA, 25 bp, Saccharomyces pastorianus
gactagtgggactaccactgccagc

SEQ ID NO: 190810 - DNA, 25 bp, Saccharomyces pastorianus
ccagcatcaacgtcaggactagtgg

SEQ ID NO: 190811 - DNA, 921 bp, Saccharomyces pastorianus
atgtccgacgaaattgtttggcaagtgattaatcaaagtttctgctctcatagaattaaggcacctaatggtcaaaatttttgcagaaatgagtataacgtcactgggttgtgtacaaggcaatcatgcccacttgccaactccaagtatgcaacagtgaagtgtgacaatgggaaactgtacttgtatatgaagacgcctgaaagagcgcacactcctgccaagttatgggaaagaatcaaactatccaaaaattacacgaaggctttacaacagatcgacgaacacctactacattggagcaagtttttccgtcataagtgtaaacagagatttacaaaattgacgcaggtcatgataacagagagacgtttagcattaagggaggaggagagacactacgttggtgtagcaccaaaggtcaaaagaagagaacaaaacagggagagaaaggcattggtagctgccaagattgaaaaagccatcgaaaaagaattgatggacagattaaagagtggtgcttacggtgataaaccattaaatgttgacgaaaaggtctggaagaagataatgggtcaaatggaagaggagaattctcaggacgaggaagaagactgggatgaagaagaggaaagtgatgatggggaagttgaatacgttgcagatgatggcgaaggtgaatacgttgacgtggatgacttagaaaagtggttagctgactctgacagagaagcttccagcgccagtcaaagcgaaagcgacagtgaaagcgagagcgacagcgatagtgatgaagaaaataagaattcagccaagagacgtaagaagggaactagtgccaaaactaaacgtcctaaagtcgaaatcgaatacgaggaggaacacgaagttcaaaatgctgagcaagaagtggcacaataa

SEQ ID NO: 190812 - DNA, 93 bp, Saccharomyces pastorianus
atgtcaatctcgtttccaaaaatgcaacacctcatcgttatgacgacaattggagacaaaaaggttaacaataacataatactctttttatag

SEQ ID NO: 190813 - DNA, 975 bp, Saccharomyces pastorianus
atgattctttttttaaacggtagagacttgcaaagtgttggagtgaccagcaccggccttgaaaccttggatggaaacgtaagtgtcacccttcttcaagataccgaattccttagccttttcaataccgaagttgatacgggcttcaacatcatcagtccagtcagagacaggttccttttcgaaaacgaatgggaagacacctctgtacaagtgagagaatctagcagctcttgggcatctggtaaccaagatgattggacagtttggtctgtacttggaaaccaatcttggggtggtaccggaagtggacaagacaatgatagccttggccttttgttcgaaaacagcagcgacagcggaggcagcgacggtttcggtggtggaggttggctttggagtacagtttctcatgtcatcgtagtttggcaagtaagcgatagcttgttcagcaatgacagcggtttcagccatagtggtaacggcgttgattgggtagttacccttggcggtttcaccagacaacataacacagtcagcaccatccaagatagcgttaccgacatcggaaacttcagctctggttggtcttgggttgtaagtcatggattccaacatttgggtagcacagataactggcttaccagccaagttagacttagcaatcaatttcttttggacagccaagacttctggggctgggatttcaatacccaagtcacctctggcaaccataacaccgtcagtgaccttcaagatttcgtcgaagttgttaacaccttgttggttttcaatcttgacaatgatcttgacgtccttaccttgttcacccaagacttctctgatggtcaaaacatcgttggcggttctgatgaaagaagcgaagaccatgtggacaccgttcttgacaccgaatctcaaatcttccttgtccttttcagacaaagctggcaaatcgacatcggtacctggtaa

SEQ ID NO: 190814 - DNA, 804 bp, Saccharomyces pastorianus
atggatatggaaatcgaagattcaagccccatagatgacctgaagttacaaaaactggataccaatgtttattttggaccctgtgagatattgacacaacctattcttttgcaatatgaaaatattaagttcatcattggtgtcaatctaagtactgaaaagatagcgtcgttttatacccagtatttcaggaactctaattcggtagtcgtgaatctttgctcaccaactacagcagcagtagcaacaaagaaggccgcaattgatttgtatatacgaaacaatacaatactactacagaaattcgttggacagtacttgcagatgggcaaaaagataaaaacatctttaacacaggcacaaaccgatacaatccaatcactgccccagttttgtaattcgaatgtcctcagtggtgagcccttggtacagtaccaggcattcaacgatctgttggcactctttaagtcatttagtcattttggaaatatcttggttatatcatcacattcctatgattgcgcacttctcaaatttcttatttccagggtgatgacctactatccactagtgaccatccaggattctttgcaatatatgaaagcaaccctgaacatatccatcagtacatccgatgagttcgatattctgaatgataaagaactgtgggagtttggccaaacccaggaaattctaaaacgtaggcagacgagctcagtcaagaggagatgtgtcaatttaccagaaaactctacgatcgataacagaatgcttatgggtaccacaaagcgaggtcgcttttga

SEQ ID NO: 190815 - DNA, 291 bp, Saccharomyces pastorianus
atgtgccctcgcacagttttgctcatcataaacattaatcattggttttatgataagaatatcgtaagaattattttaactttcagattagattccggccatatttctgacatttgttttattaataaaaatttggcgaatgctttgataactgctgatatttcattgttgaaaaggcatgatataagatgcacaaagtatattataacttattatcagagatataggaacaaagaaaaagggaaattcatatctctatgtaaaaataccattatttcctcttctgtttaa

SEQ ID NO: 190816 - DNA, 381 bp, Saccharomyces pastorianus
atgacaggttactttttaccaccacaaacaagttcttacacgttcaggtttgctaaggtcgatgactctgcaattctatcagtcggtggcgacgttgcattcggatgctgtgcacaagagcaacctccaattacatccacaaactttacgattaatggtatcaagccatggcaaggaagattgcccgataacattgcagggactgtgtatatgtatgctggattctactgtccaatgaagattgtctactcaaacgctgtttcttggcatacactgccagttagcgtggaattgcctgatgttactactgttagcgatgattttgcagggcacgtttactcttttgacgatgacctaacagcccaattgtactatccctga

SEQ ID NO: 190817 - DNA, 327 bp, Saccharomyces pastorianus
atgcgatatactgcaacttttcggcctttgcaacgatttgtaatgaatccttttgcatcgctagaaggacaagataatatttcttctgttttttttttacatatgcaacaatttgaaagtcaggtcaaagacagattccggttccccatattcagattggagagaaaaacttttggcaactcatgttaccaagtcgagacgcttaaagttaagtgtcggccaagacacgcaaaatcttgtaatcttttaacgctgctcttcaaatcacggacgcaatcagtacttgtacctaattttggttttctaatattgaatagcgaaccatag

SEQ ID NO: 190818 - DNA, 387 bp, Saccharomyces pastorianus
atgaacagtgctaccagtgagacaacaaccaatactggagctgctgagacaactaccagtactggagctgctgagacgaaaacagtagtcacctcttcaatttcaagattcaatcatgctgaaacacagacggcttccgcgaccgatgtgattggtcacagcagtagtgttgtttctgtatccgaaactggcaacaccaagagtctaataacttccgggttaagtactatgtcgcaacagcctcgtagcacaccagcaagtagcataataggatctagtactgcctctttagaaatctcaacctacgttggtattgccaatggtctgttgaccaataatggcataagtgtttttatttccaccgtattgctggcaatcgtatggtaa

SEQ ID NO: 190819 - DNA, 255 bp, Saccharomyces pastorianus
atgcacggcacttgcctcagcggtctataccctgtgccatttacccataacgcccatcattatccacattttgatatctatatctcattcggcggtcccaaatattgtataactgcccttaatacatacgttataccacttttgcaccatatacttaccactccatttatatacacttatgtcaatattacagaaaaatccccacaaaaatcacctaaacataaaaatattctacttttcaacaataatacataa

SEQ ID NO: 190820 - DNA, 315 bp, Saccharomyces pastorianus
atgatcgtaaataacacacacgtgcttaccctaccactttataccaccaccacatgccatactcaccctcacttgtatactgattttacgtacgcacacggatgctacagtatataccatctcaaacttaccctactctcagattccacttcactccatggcccatctctcactgaatcagtaccaaatgcactcacatcattatgcacggcacttgcctcagcggtctataccctgtgccatttacccataacgcccatcattatccacattttgatatctatatctcattcggcggtcccaaatattgtataa

SEQ ID NO: 190821 - DNA, 3591 bp, Saccharomyces pastorianus
atggagacttttactgggtatctaaaaagtacttgcttccatcaaatatctccgtacccaccatcaataatgtccatacaagtgaaagtacacgcaaatatccttatcctttcattcatcgaatgcttgcgcatgccaatgcacagacaaattcgatactcacttaaaaataacaccatcacgtattttaacgaatcagatgtcgactggtctagtgctattgactatcaatgtcctgattgtttaatcggcaaaagcaccaaacacagacatatcaaaggttcacgactaaaataccaaaattcatacgaaccctttcaatacctacatactgacatatttggtccagttcacaacctaccaaaaagtgcaccatcctatttcatctcatttactgatgagacaacaaaattgcgttgggtttatccattacacgaccgtcgcgaggactctatcctcgatgtttttactacgatactagcttttattaaaaaccagtttcaggccagtgtcttggttatacaaatggaccgtggttctgagtatactaacagaactctccataaattccttgaaaaaaatggtataactccatgctatacaaccacagcggattcccgagcacatggagtcgctgaacggctaaaccgtaccttattagatgactgccgtactcaactgcaatgtagtggtttaccgaaccatttatggttctctgcaatcgaattttctactattgtgagaaattcactagcttcacctaaaagcaaaaaatctgcaagacaacatgctggcttggcaggacttgatatcagtactttgttacctttcggtcaacctgttatcgtcaatgatcacaaccctaactccaaaatacatcctcgtggcatcccaggctacgctctacatccgtctcgaaactcttatggatatatcatctatcttccatccttaaagaagacagtagatacaactaactatgttattcttcagggcaaggaatccagattagatcaattcaattacgacgcactcactttcgatgaagacttaaaccgtttaactgcttcatatcattcgttcattgcgtcaaatgagatccaagaatccaatgatcttaacatagaatctgaccatgacttccaatccgacattgaactacatcctgagcaaccgagaaatgtcctttcaaaagctgtgagtccaaccgattccacacctccgtcaactcatactgaagattcgaaacgtgtttctaaaaccaatattcgcgcacccagagaagttgaccccaacatatctgaatctaatattcttccatcaaagaagagatctagcaccccccaaatttccaatatcgagagtaccggttcgggtggtatgcataaattaaatgttcctttacttgctcccatgtcccaatctaacacacatgagtcgtcgcacgccagtaaatctaaagatttcagacactcagactcgtacagtgaaaatgagactaatcatacaaacgtaccaatatccagtacgggtggtaccaacaacaaaactgttccgcagataagtgaccaagagactgagaaaaggattatacaccgttcaccttcaatcgatgcttctccaccggaaaataattcatcgcacaatattgttcctatcaaaacgccaactactgtttctgaacagaataccgaggaatctatcatcgctgatctcccactccctgatctacctccagaatctcctaccgaattccctgacccatttaaagaactcccaccgataaattctcatcaaactaattccagtttgggtggtattggtgactctaatgcctatactactatcaacagtaagaaaagatcattagaagataatgaaactgaaattaaggtatcacgagacacatggaatactaagaatatgcgtagtttagaacctccgagatcgaagaaacgaattcacctgattgcagctgtaaaagcagtaaaatcaatcaaaccaatacggacaaccttacgatacgatgaggcaatcacctataataaagatattaaagaaaaagaaaaatatatcgaggcataccacaaagaagtcaaccaactattgaaaatgaatacttgggacactgacaaatattatgacagaaaagaaatagaccctaaaagagtaataaactcaatgtttatcttcaacaagaaacgtgacggaactcataaagctagatttgttgcaagaggtgacattcagcatcctgatacgtacgatacaggtatgcaatccaacactgtacatcattatgcgttgatgacatccctgtcacttgcattagacaataactactatattacacaattagacatatcttcggcatatttgtatgcagacatcaaagaagaattatacataagacctccaccacatttaggaatgaatgataagttgatacgtttgaagaaatcactttatggattgaaacaaagtggagcgaactggtacgaaactatcaaatcatacctgataaaacagtgtggtatggaagaagttcgtggatggtcatgcgtatttaagaatagtcaagtaacaatttgcttattcgttgatgatatgatattgttcagcaaagacttaaatgcaaataagaaaatcataacaacactcaagaaacaatacgatacaaagataataaatctgggtgaaagtgataacgaaattcagtacgacatacttggcttagaaatcaaatatcaaagaggtaaatacatgaaattaggtatggaaaaatccttgacagaaaaattacccaaactaaacgtacctttgaacccaaaaggaaagaaacttagagctccaggtcaaccaggtctttatatagaccaggatgaactagaaatagatgaagatgaatacaaagagaaggtacatgaaatgcaaaagttgattggtctagcttcatatgttggatataaatttagatttgacttactatactacatcaacacacttgctcaacatatactattcccctctaggcaagttttagacatgacatatgagttgatacaattcatgtgggacactagagataaacaactgatatggcacaaaaacaaacctaccgagccagataataaactagtcgcaataagtgatgcttcgtatggcaaccaaccgtattataaatcacaaattggcaacatatatttacttaatggaaaggtaattggaggaaagtccaccaaggcttcattaacatgtacttcaactacggaagcagaaatacacgcgataagtgaatctgtcccattattaaataatctaagttacctgatacaagaacttaacaagaaaccaattattaaaggcttacttactgatagtagatcaacgatcagtataattaagtctacaaatgaagagaaatttagaaacagattttttggcacaaaggcaatgagacttagagatgaagtatcaggtaataatttatacgtatactacatcgagaccaagaagaacattgctgatgtgatgacaaaacctcttccgataaaaacatttaaactattaactaacaaatggattcattag

SEQ ID NO: 190822 - DNA, 1323 bp, Saccharomyces pastorianus
atggaatcccaacaattatctcaacattcacccatttctcatggtagcgcctgtgcttcggttacttctaaggaagtccacacaaatcaagatccgttagacgtttcagcttccaaaacagaagaatgtgagaaggcttccactaaggctaactctcaacagacaacaacacctgcttcatcagctgttccagagaacccccatcatgcctctcctcaaactgctcagtcacattcaccacagaatgggccgtacccacagcagtgcatgatgacccaaaaccaagccaatccatctggttggtcattttacggacacccatctatgattccgtatacaccttatcaaatgtcgcctatgtactttccacctgggccacaatcacagtttccgcagtatccatcatcagttggaacgcctctgagcactccatcacctgagtcaggtaatacatttactgattcatcctcagcggactctgatatgacatccactaaaaaatatgtcagaccaccaccaatgttaacctcacctaatgactttccaaattgggttaaaacatacatcaaatttttacaaaactcgaatctcggtggtattattccgacagtaaacggaaaacccgtacgtcagatcactgatgatgaactcaccttcttgtataacacttttcaaatatttgctccctctcaattcctacctacctgggtcaaagacatcctatccgttgattatacggatatcatgaaaattctttccaaaagtattgaaaaaatgcaatctgatacccaagaggcaaacgacattgtgaccctggcaaatttgcaatataatggcagtacacctgcagatgcatttgaaacaaaagtcacaaacattatcgacagactgaacaataatggcattcatatcaataacaaggtcgcatgccaattaattatgagaggtctatctggcgaatataaatttttacgctacacacgtcatcgacatctaaatatgacagtcgctgaactgttcttagatatccatgctatttatgaagaacaacagggatcgagaaacagtaaacctaattacaggagaaatccgagtgatgagaagaatgattctcgcagctatacgaatacaaccaaacccaaagttatagctcggaatcctcaaaaaacaaataattcgaaatcgaaaacagccagggctcacaatgtatccacatctaataactctcccagcacggacaacgattccatcagtaaatcaactactgaaccgattcaattgaacaataagcacgaccttcatcttaggccagaaacttactga

SEQ ID NO: 190823 - DNA, 168 bp, Saccharomyces pastorianus
atggtcaaattaacttcaatcgctgccggtgtcgccgccattgctgctggtgcctccgccgcagcaaccactacattatctcaatctgacgaaagagttaatttggttgaattaggtgtttatgtttccgatatcagagctcatttggctgaatactactctttctaa

SEQ ID NO: 190824 - DNA, 771 bp, Saccharomyces pastorianus
atggaacaacctgatctatcgtctgtggccatcagtaagccgctgctgaagttgaaacttctcgacgcccttcgccagggaagtttccccaacctacaagatctcctaaagaaacaattccagccgctagacgacccaaacgtccaacaagtgctccatctcatgctccactatgccgtgcaagtcgcccccatggctgtcataaaggaaatcgtccatcattgggtctcaactacaaacaccacttttctaaacatccatcttgatctaaacgaacgggactccaacggcaacaccccattgcacatcgccgcctaccagtcccgcggtgatatcgtagccttcctcctggaccaaccaaccatcaacgactgcgtgctcaacaactcccacttgcaggccatcgaaatgtgcaagaacctaaacatcgcgcagatgatgcaggtgaaacgctccacatacgttgcagagaccgcccaggaattcagaacagcttttaacaacagggacttcggccacctagaatctatcctctccagccctcgaaacgcagaactgctcgacatcaacggtatggacccggagactggcgataccgttctgcacgaattcgtcaagaaaagagacgtcatcatgtgccgttggttgcttgaacacggtgctgaccccttcaagagagaccgcaaggcaaactgcccatcgagctcgttaggaaagtcaatgaaaacgacaccgccaccagcaccaagatcgccatcgacatcgaactga

SEQ ID NO: 190825 - DNA, 321 bp, Saccharomyces pastorianus
atgtaccaaacctcgcctctttctttgttctattttcaggttcttgtaccaaaatttttggagtgttttctgtgtttcccatatcataaaataagtttagtggctcttcttagtttcttttattgccaacttcagacaaacatgatcatattattgagccaaataaagcgtttcctgtataggcagataatgattgcattgaaaataaaagccaaaaaattttggttcatatttaagtattttaatgtcagttgtgacgctagacttttcaatgaactcttttatatctttcaaacgtatgtctccgtggattcaaaatag

SEQ ID NO: 190826 - DNA, 297 bp, Saccharomyces pastorianus
atgtatgagtacttattattaacgaggaaaaatgccctattttctttagcaattaatgaaccatcgccaacttttgctttaacaattattgccattttcagcagtactaacgtaagatctagtgtggttcgcttaggatgttttcgagtagaaatctgctgcacatgccacacgcagtacttgaaacttgaaataatggtgataattagttatttaaagtatgttaatcttccttgttcttttatatttatttcgaattcttttgcactagtatttaaaatatcagcagaggtgtaa

SEQ ID NO: 190827 - DNA, 336 bp, Saccharomyces pastorianus
atgtcaaaaaccgatgtcaaaaaatctcgtgaggcctccggaattttgacgctgcaagtcaatctacgggaaagaagaaattttttaaacttaatgcaaaataagcttttttcttggaaaataagattttcggcaataaaaggtaaatgcagccaaaaatcaaaatacttcagaagaagtcgtagcgaggactgctacgtggaagcggatttgaagatcctttccagaacaagaaggagccgaaagctgccaggaactgttcctgattttttaggaaaacaattaataggtatctcgtctagcgtagtatctcgagtttccagaagttgcagataa

SEQ ID NO: 190828 - DNA, 204 bp, Saccharomyces pastorianus
atgccttatcactatttatttttggcactcttcacctacctggccacgtccaatgttgtttcaggaagtacacaagcatgcctgccagtgggcccgaggaaaaatgggatgaatgtcaacttttataaatactcattactggattcaacaacgtattcctacccgcaatatatgacttctggatatgcctcgaattggaattag

SEQ ID NO: 190829 - DNA, 597 bp, Saccharomyces pastorianus
atgacaggttactttttaccaccacaaacaagttcttacacgttcaggtttgctaaggtcgatgactctgcaattctatcagtcggtggtaacgttgcgttcgaatgttgtgcacaagaacaacctccaattacatcgacggattttacaatcaatggtattaagccatggcaaggaagtttgcctgataacatcggagggactgtctacatgtatgcaggctactattatccgctgaaggttgtttactccaatgccgtttcctggggcacgcttccaattagcgtggaattgcctgatggtactactgttagtgatgactttgaagggtacgtttactcttttgacgatgatttaagtcagtcaaattgtactatccctgatccttcaaaacatactactagcatcgtcacaactactaccgaactgtggactggtacttttacttctacatctactgaaatgaccaccgtcaccggtactaatggtcaaccaactgacgaaaccgttattgttgccaaagctccaaccactgccacctcatccagtttgtcatcatcttcttcagaacaaatcaccagctctatcacgtcttag

SEQ ID NO: 190830 - DNA, 1212 bp, Saccharomyces pastorianus
atggccgccattagagactacaagaccgcactagatcttaccaagagcctaccaagaccggatggtttgtcagtgcaggaactgatggactccaagatcagaggtgggttggcttataacgattttttaatcttaccaggtttagtcgattttgcgtcctctgaagttagcctacagaccaagctaaccaggaatattactttaaacattccattagtatcctctccaatggacactgtgacggaatctgaaatggccacttttatggctctgttggatggtatcggtttcattcaccataactgtactccagaggaccaagctgacatggtcagaagagtcaagaactatgaaaatgggtttattaacaaccctatagtgatttctccaactacgaccgttggtgaagctaagagcatgaaggaaaagtatggatttgcaggcttccctgtcacggcagatggaaagagaaatgcaaagttggtgggtgccatcacctctcgtgatatacaattcgttgaggacaactctttactcgttcaggatgtcatgaccaaaaaccctgttaccggcgcacaaggtatcacattatcagaaggtaacgaaattctaaagaaaatcaaaaagggtaggctactggttgttgatgaaaagggtaacttagtttctatgctttcccgaactgatttaatgaaaaatcagaagtacccattagcgtccaaatctgccaacaccaagcaactgttatggggtgcttctattgggactatggacgctgataaagaaagactaagattattggtaaaagctggcttggatgtcgtcatattggattcctctcaaggtaactctattttccaattgaacatgatcaaatggattaaagaaactttcccagatttggaaatcattgctggtaacgttgtcaccaaggaacaagctgccaatttgattgctgccggtgcggacggtttgagaattggtatgggaactggctctatttgtattacccaaaaagttatggcttgtggtaggccacaaggtacagccgtctacaacgtgtgtgaatttgctaaccaattcggtgttccatgtatggctgatggtggtgttcaaaaacattggtcatattattaccaaagctttggctcttggttcttctactgttatgatgggtggtatgttggccggtactaccgaatcaccaggtga

SEQ ID NO: 190831 - DNA, 416 bp, Saccharomyces pastorianus
atgcttttcttctcctttttcaagactttagttgaccaagaagtggtcgtagaggtatgttcataatgatttacatcggaattccctttgatacaagaaaactaacgggtatcgtacatcaatttttgaaaaaagtcaagtactaacgtttgtttacccctgtttattgtgtttccactcagttaaaaaacgacattgaaataaaaggtacactacaatcagttgaccaatttttgaatctgaaactagacaacatatcatgcacagatgaaaaaaaatatccacacttgggttccgtaaggaatatttttataagaggttcaacagtcaggtacgtttacttgaataagaacatggtagatacgaatttgctacaagacgctaccagaagggaggtaatgactgaaagaaaataa

SEQ ID NO: 190832 - DNA, 954 bp, Saccharomyces pastorianus
atgtatgtttaacagtgatactaaattttgaacctttcacaagatttatctttaaatatgttatgaatgtcatcctttggagagaaatagataaggaaaaaaattgaggatacagcatccggtggtcgcatagttggtagcaacatccatagaagaacctcagataaatttcaagcttgtacgaattgccgcgtttattacaaactatagaattatcgcagcaatggtacgtgtctgttcctgcaagcgttaattcgattgatagataaagtaattcattaacctttgcgaatatgctctttactgttaggtttcaggattttaaaaatgaagcaactttactaacatcaatatgcaaataaatctgcaaaaactttttttcacagggctaacttgcgtactcaaaagagacttgccgcttctgttgtcggtgttggtaagagaaaggtttggttagacccaaacgaaacttctgaaattgcccaagccaactctagaaatgccattagaaaattggtcaagaacggaaccatcgtcaagaaggccgttactgtccactctaaatctagaactagagcccatgctcaatccaagagagaaggtcgtcacagtggttacggtaagagaaagggtactagagaagctcgtttaccatcccaagtcgtctggatcagaagattacgtgtcttgagaagattattggccaagtaccgtgacgctggtaagattgacaagcatttgtaccacgttttgtacaaggaatccaagggtaacgccttcaagcacaagagagctttggttgaacacattattcaagctaaggctgatgctcaacgtgaaaaggctttgaacgaagaagctgaagctagaagattgaagaacagagctgctcgtgacagaagagctcaaagagttgctgaaaagagagacgctttgctaaaggaagacgcttaa

SEQ ID NO: 190833 - DNA, 757 bp, Saccharomyces pastorianus
atgaatccgtttagaatcttaggtatgttactatttggagtttcatgaggcttttcccgccgtagatcgaacccaatcttactaacagagaaagggctttttcccgaccatcaagacaggtgatttatcacatctaaccagtatactgatcctgattcataatatcaagaccacaaggtacattgaaggtatttctttcaagacccaaacgttgtacgctttggttttcataacacgatacttggatctcttgacttttcactgggtatccctatacaatgctctaatgaaaatatttttcattgtatctaccgcttacattgtagtgctattacaagggtctaaaagaaccaacaccattgcgtataatgaaatgcttatgcatgatacctttaagatccagcatttactaattgggagtgctctaatgagtgtttttttccatcacaagttcacttttcttgaattagcatggagtttttctgtatggttggagagtgtggctattctacctcaattgtacatgctatctaagggtgggaagactagaagtctaactgttcattatatttttgccatgggattatacagagcattgtatattcctaactggatttggaggtacagcacggaagataaaaaattggacaagattgccttcttcgcgggacttttgcaaactctgttgtactctgatttcttttacatttactacactaaagtcatcagaggaaagggtttcaaactgccaaaataa

SEQ ID NO: 190834 - DNA, 237 bp, Saccharomyces pastorianus
atgttcgggtctattatctggtcatataactacacacattactattttgatccgaatgcaaagacggcttccgccaataatgattggattgagcaatgtggcgactttttgaagaacggtactgtaaaatgtgtcgtcgacaaagtttatgactggaaagaccataaagaagcattttcttatatggccactcaacgtgcccaaggaaagttaatcatgaacgtcgaaaaattctag

SEQ ID NO: 190835 - DNA, 5314 bp, Saccharomyces pastorianus
atggaatcccaacaattacatcaaaatccacattctctacatggtagcgcctatgcttcggttacttctaaggaagtctcatcaaatcaagatccgttagccgtttcagcttccaatttaccggaatttgatagagattccactaaggttaattctcaacaagagacaacacctgggacatcagctgttccagagaaccatcatcatgtctctcctcaacctgcttcagtaccacctccacagaatggacagtaccaacagcacggcatgatgactccaaacaaagctatggcttctaactgggcacattaccaacaaccatctatgatgacgtgttcacattatcaaacgtcacctgcgtattatcaaccggacccacactatccgctgccacagtatatcccaccgctgagtacttcctcacctgatccaatcgattcacaggatcaacactctgaagtacctcaagctaagacaaaggtgagaaataatgtcttaccaccacacactttaacatcagaagaaaacttttatacatgggttaaattttacatcagatttttgaagaactctaatctcggtgacatcattccaaatgatcagggtgaaatcaaaagacaaatgacttatgaagaacatgcgtatatatacaataccttccaagcatttgccccatttcatttattgccaacatgggtaaaacaaattttagaaattaattatgctgacatccttacagtcctttgtaaaagtgtgtccaaaatgcaaactaacaatcaagaattaaaggattggatagctcttgccaaccttgagtacgacggaagtacatctgctgatacatttgaaattacggtcagcacgatcattcaaaggctaaaagaaaacaatatcaatgttagcgacagattggcctgtcaactaatacttaaaggtctatccggtgacttcaaatacctacgtaatcaatatcgtaccaaaacgaacatgaaactttcccaattattcgctgaaattcaattaatatatgacgaaaataaaatcatgaatctaaataaaccgtcccaatacaaacaacacagcgaatacaaaaatgtttctcgcacatctccaaacacgactaacacaaaggttacaactcgtaattatcatagaacaaatagttcaaaaccaagagcagcaaaagctcacaatattgctacatctagtaaattctcaagggtgaacaatgatcacattaatgaatcaaccgtttcatcacaatacttaagcgatgacaacgaacttagtcttaggccagcaacagaaagaatctaagccaacacacacaatagactcgaatgacgaactacctgatcaccttcttattgattcaggagcttcgcaaacgcttgtcagatcagcccattatttacaccatgcaacacccaattctgaaataaacatagtcgatgctcaaaaacaagacattcctataaatgccattggtaatcttcacttcaactttcagaacggcaccaaaacatcaataaaagcactgcacacaccaaacatagcctatgatctattaagtttgagtgagctggctaatcaaaatattactgcctgctttaccagaaacactttagaaagatcggatggtacagtactagctcccatagtcaaacatggagacttttactggttatctaaaaaatacctaattccttcgcacatttcaaagctaacaataaacaacgtcaacaaaagcaaaagcgtaaataaatatccatatccgttaatacatcgaatgcttggacatgctaacttccgaagtattcagaagtctcttaagaagaatgcagttacatatttgaaagaatcggatattgaatggtctaacgctagcacatatcaatgtcctgactgtctaatcggcaaaagcacgaaacataggcatgtcaaaggatcacgactaaagtaccaagaatcatatgagccttttcagtacttgcataccgatatatttggtcctgtacatcacttaccgaaaagtgcaccttcttactttatatcgtttacagatgagaaaaccagattccaatgggtctacccattacacgaccgtcgtgaagaatctatactcaatgtttttacatcgatattagcatttattaagaaccaattcaatgctcgcgttctagttatccagatggatcgtggctccgagtacactaacaaaactcttcataagttctttacgaacagaggtattactgcatgctatacaaccacggcagattctagagcacacggtgtcgctgaacgattaaatcgtactttattaaacgattgtcgcacactgcttcattgcagtggtctaccaaatcatctatggttctcagcagtcgaattttctactataatcagaaattcattagtctcaccaaaaaacgataaatctgcaagacaacatgcaggtttagctggactggacattactactatactacctttcggtcaaccggttatagttaacaaccataatcccgactcgaaaatacatcctcgtggcattccaggttacgccttacatccgtcacgaaactcttatggctatattatctatcttccatcattaaaaaagacagtagatactaccaattacgttatattacaagacaaccaatccaaattggaccaattcaattatgatacactcacctttgatgatgatctcaatcgtttaacagcccataaccaatcttttattgaacaaaatgaaacagagcagtcatatgatcaaaatacagaatctgatcatgactatcaatcggagattgaaataaactctgatcctctagtgaacgacttctcgtcccaatcaatgaaccctttacaattagaccacgaaccagtccaaaaagtacgtgcactaaaagaagttgatgccgacatatctgaatacaatattcttccatctcctgtacgatctcgtacaccccatatcattaataaagagagtaccgaaatgggtggtaccattgaatcagatactacttcacctagacactcgtctaccttcactgcacgaaaccaaaagcgacctggtagtcccaatgatatgattgatttgacctcacaggatagagttaattatgaacttgaaaacatcaaaactacccgtttgggtggtacggaggaaccatatattcaacgaaatagtgatacaaatatcaaatacaggactacaaatagtacgccctcaatagatgaccgttcgcccgacagtgactctactactcccatcatctccatagaaacaaaggctgcatgcgataatacaccctccattgatacggatccgccagaatatcgatcttctgaccatgcgactcctaatataatgcctgacaaatcctcaaaaaatgttacggctgattctattcttgacgacctcccacttcctgacttaactaataaatctcctacggacacttctgatgtttcaaaagatattccacacatacactctcgtcagactaattccagtttgggtggtatggatgattctaatgttctgactactaccaaaagtaagaaaagatcattagaagataatgaaactgaaattgaggtatcccgagacacatggaataataagaatatgagaagtctggaaccaccaagatcgaagaaacgtataaatctaattgcagcaataaaaggagtaaaatcaatcaaaccagttcgaacgaccttaagatatgatgaagcaattacatataatgaagacaacaaagaaaaagacagatatattgaagcttatcataaagaaattaaccaactattgagaatgaacacttgggatacaaacaaatattatgatagaaatgacatagatcctaagaaagtaataaactcaatgtttatatttaacaaaaaacgtgatggtacacacaaagccagatttgttgcaagaggcgacattcaacaccccgatacatatgattctgatatgcaatccaataccgtacatcactatgcactgatgacgtcattgtcaatcgcattagacaatgactattatatcacacagctggacatatcctctgcttacttatatgctgatatcaaagaagaattatacataagacctccaccacatttaggtttgaatgataagttactacgtttgagaaaatcactctatggtttgaaacaaagtggtgcaaactggtatgaaaccattaaatcatatttaataaattgttgcgacatgcaagaagttcgcggatggtcatgcgtatttaagaatagtcaagtaacaatttgcttattcgttgatgatatgatattgttcagcaaagacttaaatgcaaatgagaaaatcataacaacactcaagaaacaatacgatacaaagataataaatctgggtgaaagtgataacgaaattcagtacgacatacttggattagagatcaaatatcaaagaagcaagtacatgaaattaggtatggaaaaatccttgacagaaaaattacccaaactaaacgtacctttgaacccaaaaggaaagaaacttagcgctccaggtcaaccaggtcattatatagaccaggatgaactagaaatagatgaagatgaatacaaagagaaagtacatgaaatgcaaaagttgattggtctagcttcttatgttggatataaatttagatttgacttactatactacatcaacacacttgctcaacatatactattcccctctaggcaagttttagacatgacatatgagttaatacaattcatgtgggacactagagataaacaattaatatggcacaaaaacaaacctaccaagccagataataaactagtcgcaataagcgatgcttcatatggtaaccaaccatattacaagtcacaaattggtaacattttcctactcaacggaaaagtgattggaggaaagtcgacaaaggcttcgttaacatgcacttcaactacagaagcagaaatacacgcagtcagtgaagctataccgctattgaataacctcagtcaccttgtgcaagaacttaacaagaaaccaattattaaaggcttacttactgatagtagatcaacgatcagtataattaagtctacaaatgaagagaaatttagaaacagattttttggcacgaaggcaatgagacttagagatgaagtatcaggtaataatttatacgtatactacatcgagaccaagaagaacattgctgatgtgatgacaaaacctcttccgataaaaacatttaaactattaacaaacaaatggattcattag

SEQ ID NO: 190836 - DNA, 129 bp, Saccharomyces pastorianus
atgttgactggtattgccccagaccaagtgaccagaatgatcaccggtgttccatggtactccagcagattaaagccagccatctccagtgctctatccaaggacggtatctacactatcgcaaactag

SEQ ID NO: 190837 - DNA, 336 bp, Saccharomyces pastorianus
atgtccctacggccttgtctaacaccatccagcatgcaatacagtgacatatatatataccctaacactaccctaaccctaccctatttcaacccttccaacctgtctctcaacttaccctcacattaccctacctctccacttgttaccctgtcccattcaaccataccactcccaaccaccatccatccctctacttactaccaccaatcaaccgtccaccataaccgttaccctccaattagccatattcaacttcactaccacttaccctgccattactctaccatccaccatctgctactcaccatactgttgttctaccctccatattga

SEQ ID NO: 190838 - DNA, 318 bp, Saccharomyces pastorianus
atgcaagttctcatcggaacgaaattagtgactgaaggaattgacattaagcaattgatgatggtgatcatgcttgataatagacttaatattattgagctcattcaaggcgtagggagactaagagatgggggcctctgttatctattatctagaaaaaacagttgggcggcaaggaatcgtaagggtgaattaccaccgattaaggaaggctgtataaccgaacaggtacgcgagttctatggacttgaatcaaagaaaggaaaaaaagggccagcatgttggatgctgtggctccaggacagacctgtctgctga

SEQ ID NO: 190839 - DNA, 1242 bp, Saccharomyces pastorianus
atgaaattaaaaagtgtattcagatcagttctaaagtaccggaaaacaaatttgagtttgcttctattaatcacctattcgattattacgttactctatatctttgatcatgaacgttataaactcaatctaccaaaagaggatgagcaccctgaattcaatgacttattagaaacagcatggggggacttacagattatcacggcctcttttcatccgtacacgtccaaagaaaatgataaagtacatgattacttgctcaaaagggttcttgaaattacagggaattcttcgtttgcaagtgtttcagatgacaaagaaagcgagagatccatattatttcagcaacaagatcctttcaatgagtcatctaggttttcgagagtgacatattttgaatcttctaatatattagttaagcttgagggtaaaaatcctgaggaagaagggttacttctttcagctcatttcgactctgtacccacaggatatggagctaccgatgacggcatgggtgtagtgtctttactagcgaacctcaagtaccatataaagcacagaccgaacaggactttaattttcaactttaataataatgaagagtttggcctactaggtgcatcaacttattttgatcactcatggtctaatttaaccaagtatgtgataaatttagagggaactggtgctggtggtaaagctgtactgttccgaacttcagatacttcaacagcaagaatataccaacagtctgttaaggaaaatccatttggtaactctatctaccagcaaggtttttatagcagatatgtcaggagtgagacagactacaagatttacgaagaaaatggcatgagaggctgggatgtcgcattctacaaaccgagaaacctttatcataccataaaggattcaatacaatatacctccaaggcatctttatggcatatgctacatacttccttacaattaagtgcatatgtggcttctaattcattggatacagctgaccaaacgccggcttgttattttgattttatcggtttgaagtttttcgttataagcgctaaaacgcttttctattggaactgcatatttctattagtttcacccgttgtggccattggcttgtatttaatttctcgtgatagaatgacttggaaatcttattcatggctatcgtggaccacgctttcctctttcattagccgctggtattattgtccaaaagcttttctctaa

SEQ ID NO: 190840 - DNA, 1404 bp, Saccharomyces pastorianus
atgtttaagtctgttgtttattcggttctagccgctgctttagttaatgcaggtacaattcccctcggagagttagccgatgttgccaaaattggcactcaggaagacatattcccattcctgggtggtgccgggccatacttctctttccctggcgactatggtatttctcgtgacttgcctgaaggttgtgaaatgaaacaattgcaaatgcttgccagacatggtgaaagatacccaacttacagtaaaggtgctaccatcatgaaaacatggtataagttgagcaattacacacgtcaattcaacggctcattgtcattcttgaacgatgattacgagtttttcatccgtgatgacgatgatttggaaatggaaaccacttttgccaactcagacaatgttttgaatccatacactggtgagatggatgctaagagacatgctcgtgagtttttagcgcaatatggctacatgttcgaaaatcaaaccagtttcccaattttcgccgctagttctgaaagggttcatgacactgctcaatatttcattgatggtttaggtgaccaattcaacatctccttgcagactgtcagtgaagccatgtccgccggcgcaaacactttgagtgctggtaatgcgtgcccaggatgggatgaagatgctaacgatgacattttggacaaatacgataccacatacttggatgacattgccaagagattaaacaaagaaaacaagggtttgaatttgacctcaaaggacgccaacactttgtttgcatggtgtgcatacgaattgaacgctagaggctacagtgatgtttgtgatatcttcaccgaagatgaattggtacgttactcatacggccaggacctggtatcgttttaccaggatggaccaggttatgatatgatcagatccgtcggtgccaacttgtttaacgctactttgaagttgttaaagcaaagtgaaactcaagacttaaaagtctggttgagttttacccacgataccgatatcctaaactatttgaccaccgctggtataattgacgacaaaaacaacttaactgccgaatacgttccattcatgggcaacaccttccataagtcctggtacgttcctcaaggtgctcgtgtctacaccgaaaaattccaatgttctaacgacacctacgtcagatacgtcattaacgatgctgtcgttccaattgaaacctgttccaccggcccagggttctcttgtgaaatcaatgatttctacgactatgctgaaaagagagtagctggtactgacttcctaaaggtctgtaacgtcagcagtgtcagtaacgtcaccgaattgaccttctactgggactggaatactactcactacaacgataccctattaaaacaataa

SEQ ID NO: 190841 - DNA, 75 bp, Saccharomyces pastorianus
atgctggttttgtatcgaaaaagattttcaggttttaggttttattttttgtctatttttaaatatataatataa

SEQ ID NO: 190842 - DNA, 805 bp, Saccharomyces pastorianus
atgacattgttaaataccctcagcaacttcggtgggacatggccgcggttaatcattatgtccatgatcaactacttcaccgtgtatcagtgcactattcctggcacaaataaagtatacgtaactcacggcggcagcatgcaagcgtgcaccgagcttttgaatggcaccgtgaccatcctgcgtgacggctattacatcaccaatctcatatgtattgtagtcggacttttcctatattttggatatttgaaaaggaaaatcctccatttacaaagtctgccaatcagttcctggagatgtacgtaacgacccctcaaacaagaattgtacgacattacgttcaagaaaattttaacgagtatcgtaatatttacaagatctttttatgtactacaggaagcagaaacaaaatgagtatcaataccagtgtaaatctgttaatgagaatcatcacattatcccagttttttccatgcaagggaaaaatatactatacgacatttctatactttaattatcaattaaggtcatctttctgtacgaaaactaaccacgattgtcactaacgacgtgtcccttacccgacgcagctgctgatagcgtaccgcacaggcacagccagctcttctgtgattggcagagaggggtccttcctgcggaagacgccgcaaaggcacatatgactaaccttttttttttcgcaattaattttctaatagtttttcattttttttttacaattttggcagttacgtctcgagctatttattataagagtcagaattggcgcagggagtgttaa

SEQ ID NO: 190843 - DNA, 5314 bp, Saccharomyces pastorianus
atggaatcccaacaattacatcaaaatccacgttctcttcatggtagcgcctatgcttcggttacttctaaggaagtcccatcaaatcaagatccgttagccgtttcagcttccaatttaccggaatttgatagagattccactaaggttaattctcaacaagagacaacacctgggacatcagctgttccagagaaccatcatcatgtctctcctcaacctgcttcagtaccacctccacagaatggacagtaccaacagcacggcatgatgaccccaaacaaagctatggcctctaactgggcacattaccaacaaccgtctatgatgacgtgttcacattatcaaacgtcacctgcgtattatcaaccggacccacactatccgttgccacagtatatcccaccactgagtacttcctcacctgatccaatcgattcacagaatcaacactctgaagtacctcaagctgagacaaaggtgagaaataacgtcttaccaccacacactttaacatcagaagaaaacttttctacatgggttaaattttacatcagatttttgaagaactctaatctcggtgacatcattccaaatgaccagggtgaaatcaaaagacaaatgacttatgaagaacatgcgtatatatacaataccttccaagcatttgccccatttcatttattgccaacatgggtaaaacaaattttagaaattaattatgctgacatccttacagtcctttgtaaaagtgtgtccaaaatgcaaactaacaatcaagaattaaaggattggatagctcttgccaaccttgagtacgacggaagtacatctgctgatacatttgaaattacagtcagtacgatcattcagaggctaaaagaaaacaatatcaatgttagcgacagattggcctgtcaactaatacttaaaggtctatccggtgacttcaaatacctacgtaatcaatatcgtaccaaaacgaacatgaaactttcccaattattcgctgaaattcagttaatatatgacgaaaataaaatcatgaatctaaataaaccgtcccaatacaaacaacacagcgaatacaaaaatgtttctcgcacatctccaaacacgactaacacaaaggttacaactcgtaattatcagagaacaaatagttcaaaaccaagagcagcaaaagctcacaatattgctacatctagtaaattctcaagggtgaacaatgatcacattaatgaatcaaccgtttcatcacaatacttaagcgatgacaacgaacttagtcttaggccagcaacagaaagaatctaagccaacacacacaatagactcgaatgacgaactacctgatcaccttcttattgattcaggagcttcgcaaacgcttgtcagatcagcccattatttacaccatgcaacacccaattctgaaataaacatagtcgatgctcaaaaacaagacattcctataaatgccattggtaatcttcacttcaactttcagaacggcaccaaaacatcaataaaagcactacacacaccaaacatagcctatgatctattaagtttgagtgagctggctaatcaaaatattactgcctgctttaccagaaacactttagaaagatcggatggtacagtcctagctcccatagtcaaacatggagacttttactggttatctaaaaaatacctaattccttcgcacatttcaaagctaacaataaacaacgtcaacaaaagcaaaagcgtaaataaatatccatatccgttaatacatcgaatgcttggacatgctaacttccgaagtattcagaagtctcttaagaagaatgcagttacatatttgaaggaatcggatattgaatggtctaacgctagcacatatcaatgtcctgactgtctaatcggcaaaagcacgaaacatagacatgtcaaaggatcacgactaaagtaccaagaatcatatgagccttttcagtacttgcataccgatatatttggtcctgtacatcacttaccgaaaagtgcaccttcttactttatatcgtttacagatgagaaaaccagattccaatgggtgtacccattacacgaccgtcgtgaagaatctatcctcaatgtttttacatcgatattagcatttattaagaaccaattcaatgctcgcgttctagttatccagatggatcgtggctccgagtacactaacaaaactcttcataagttctttacgaacagaggtattactgcatgctatacaaccacggcagattctagagcacacggtgtcgctgaacgattaaatcgtactttattaaacgattgtcgcacactgcttcattgcagtggtctaccaaatcatctatggttctcagcagtcgaattttctactataatcagaaattcattagtctcaccaaaaaacgataaatccgcaagacaacatgcaggtttagctggactggacattactactatactacctttcggtcaaccggttatagttaacaaccataatcccgactcgaaaatacatcctcgtggcattccaggttacgccttacatccgtcacgaaactcttatggctatattatctatcttccatcattaaaaaagacagtagatactaccaattacgttatattacaagacaagcaatccaaattggaccaattcaattatgatacactcacctttgatgatgatctcaatcgtttaacagcccataaccaatcttttattgaacaaaatgaaacggagcagtcatatgatcaaaatacagaatctgatcatgactatcaatcggagattgaaataaactctgatcctctagtgaacgacttctcgtcccaatcaataaaccctttacaattagacaaggaaccagtccaaaaagtacgtgcaccaaaagaagttgatgccgacatatctgaatacaatattcttccatctcctgtacgatctcgtacaccccatatcattaataaagagagtaccgaaatgggtggtaccgttgaatcagatactacttcacctagacactcgtctaccttcactgcacgaaaccaaaagcgacctggtagtcccaatgatatgattgatttgacctcacaggatagagttaattatggacttgaaaacatcaaaactacacgtttgggtggtacggaggaaccatatattcaacgaaatagtgatacaaatatcaaatacaggactacaaatagtacgccctcaatagatgaccgttcgtccaacagtgaatccactactcccatcatctccatagaaacaaaggctgtatgtgataatacaccctccattgatacggatccgccagaatatcgatcttctgaccatgcgactcctaatataatgcctgacaaatcctcaaaaaatgttacggctgattctattcttgacgacctcccacttcctgacttaacccatcaatctcctacggacacttctgatgtttcaaaagatattccacacatacactctcgtcagactaattccagtttgggtggtatggatgattctaatgttctgactactaccaaaagtaagaaaagatcattagaagataatgaaactgaaattgaggtatcccgagacacatggaataataagaatatgagaagtctggaaccaccaagatcgaagaaacgcataaatttaattgcagcaataaaaggagtgaaatcgatcaaaccagttcgaacgaccttaagatatgatgaagcaattacttataataaagacaacaaagaaaaagacagatatgttgaagcttatcataaagaaattagccaactattgaaaatgaacacttgggatacaaacaaatattatgatagaaatgacatagatcctaaaaaagtaataaactcaatgtttatatttaacaagaaacgtgatggtacacacaaagctagatttgttgcaagaggcgacattcaacaccccgatacatatgattctgatatgcaatccaataccgtacatcactatgcactgatgacgtcactgtcaatcgcattagacaacgactattatatcacacagctggacatatcctctgcttacttatatgctgatatcaaagaagaattatacataagacctccaccacatttaggtttgaatgataaattactacgtttgagaaaatcactctatggtttgaaacaaagtggtgcaaactggtatgaaaccattaaatcatatttaataaattgttgcgacatgcaagaagttcgcggatggtcatgcgtatttaagaatagtcaagtaacaatttgcttattcgttgatgatatgatattattcagcaaagacttaaatgcaaataagaaaatcataacaacactcaagaaacaatacgatacaaagataataaatctgggtgaaagtgataacgaaattcagtacgacatacttggattagagatcaaatatcaaagaagcaagtacatgaaattaggtatggaaaaatccttgacagaaaaattacccaaactaaacgtacctttgaacccaaaaggaaagaaacttagagctccaggtcaaccaggtcattatatagaccaggatgaactagaaatagatgaagatgaatacaaagagaaagtacatgaaatgcaaaagttgattggtctagcttcatatgttggatataaatttagatttgacttactatactacatcaacacacttgctcaacatatactattcccctctaggcaagttttagacatgacatatgagttaatacaattcatgtgggacactagagataaacaattaatatggcacaaaaacaaacctaccaagccagataataaactagtcgcaataagcgatgcttcatatggtaaccaaccatattacaagtcacaaattggtaacattttcctactcaacggaaaagtgattggaggaaagtcgacaaaggcttcgttaacatgcacttcaactacagaagcagaaatacacgcagtcagtgaagctattccgctattgaataacctcagtcaccttgtgcaagaacttaacaagaaaccaattattaaaggcttacttactgatagtagatcaacgatcagtataattaagtctacaaatgaagagaaatttagaaacagattttttggcacaaaggcaatgagacttagagatgaagtatcaggtaataatttatacgtatactacatcgagaccaagaagaacattgctgatgtgatgacaaaacctcttccgataaaaacatttaaactattaactaacaaatggattcattag

SEQ ID NO: 190844 - DNA, 1323 bp, Saccharomyces pastorianus
atggatagatatcaaagaaagataggatgtttcatacaaatcccaaatttggggcgcggacaactgaaatacgtgggtccagtggacacgaaagctggaatgtttgctggtgtagacttacttgccaacattggtaagaacgatggatcattcatggggaagaagtattttcaaacggagtatcctcaaagtggactatttattcagttgcaaaaagtcgcatcattgatcgagaaggcatcgatatcgcaaacctcgagaagaacgacaatggaaccgctatcaatacccaaaaacagatctattgtgaggctcactaaccagttctctcccatggatgatcctaaatcccccacacccatgagaagtttccggatcaccagtcggcacagcggtaatcaacagtcgatggaccaggaggcatcggatcaccatcaacagcaagaatttggttacgataacagagaagacagaatggaggtcgactctatcctgtcatcagacagaaaggctaatcacaacaccaccagcgattggaaaccggacaatggccacatgaatgacctcaatagcagcgaagttacaattgaattacgagaagcccaattgaccatcgaaaagctacaaaggaaacaactacactacaaaaggctactcgatgaccaaagaatggtcctcgaagaagtgcaaccgacttttgataggtatgaagccacaatacaagaaagagagaaagagatagaccatctcaagcaacaattggagctcgaacgcagacagcaagccaaacaaaagcagttttttgacgctgagaatgaacagctacttgctgtcgtaagccaactacacgaagagatcaaagaaaacgaagagagaaatctttctcataatcaacccactggtgccaacgaagatgtcgaactcctgaaaaaacagctggaacaattacgcaacatagaagaccaatttgagttacacaagacaaagtgggctaaagaacgcgaacaattgaaaatgcataacgattcgctcagtaaagaataccaaaatttgagcaaggaactatttttgacaaaaccacaagattcctcatcggaagaggtggcatccttaacgaaaaaacttgaagaggctaatgaaaaaatcaaacagttggaacaggctcaagcacaaacagccgtggaatcgttgccaattttcgacccccctgcaccagtcgataccacggcaggaagacaacagtggtgtgagcattgcgatacgatgggtcataatacagcagaatgcccccatcacaatcctgacaaccagcagttcttctag

SEQ ID NO: 190845 - DNA, 369 bp, Saccharomyces pastorianus
atgctgaagtacgtggtgacggatattgggaagatgtgtttgtacatttggccttatagagtgtggtcgtggcggaggttgtttatctttcgagtactgaatgttgtcagtatagctatcctatttgaaactccccatcgtcttgctcttgttcccaatgtttgtttatacactcatatggctatacccttatctacttgcctcttttgtttatgtctatgtatttgtataaaatatgatattactcagactcaagcaaacaatcaaagaaatctttcactgctcttttctgtgttccatttagtttttagtacgattgcattgtctatatactgtatttaccaaatcttaattttagtcaaacattaa

SEQ ID NO: 190846 - DNA, 528 bp, Saccharomyces pastorianus
atgtttacttcgaagcctgctttcaaaattaagaacaaagcatccaaatcatacagaaacacagcggtttcaaaaaagctgaaagaaaaacgtctagctgagcatgtgaggccaagctgcttcaatattattcgaccactcaagaaagatatccagattcctgttccttcctctcgatttttaaataaaatccaaattcacaggatagcgtctggaagtcaaaatactcagtttcgacagttcaataagacatctataaaatcttcaaagaaatatttaaactcatttatggcttttagagcatattactcacagtttggctccggtgtaaaacaaaatgtcttgtcttctctgctcgctgaagaatggcacgcggacaaaatgcagcacggaatatgggactacttcgcgcaacagtataattttataaaccctggttttggttttgtagagtggttgacgaataattatgctgaagtacgtggtgacggatattgggaagatgtgtttgtacatttggccttatag

SEQ ID NO: 190847 - DNA, 783 bp, Saccharomyces pastorianus
atgtttgtactgatagataatgtcctcgcctaccttcttgaacaagacgacctatttgtaaccgcacgcttcgctatccagggccaaattgtctcaagaagagttaacaaaatacatatctccaacatcacagacgtccttctacaacaattcataagtcacacactgccctataatgacaatatcgtcccaaaaaaaatcctcgacagcatgagaacggccgtacggcagttgctggaagcaactgcctgtgtctctagagaatgccccctcgtcaaaagaagtcaggacataaaaagagcaagaaaacgtctactcagtgactggtataggctcggcgctgatgcaaacatggatgccgtattactagttgttaactccgcctggaggtttctggccgtctggcgacccttcgtaaactcaatccaacatgcaactcaggaattgtatcaaaatatcgcccattaccttcttcatggcaacgtaaatatacagagggtcacagcactactacagctcgtaatgggacaggacgatttactttttagtatggatgatgttctacaagaggtcttcagaatacagctctatttgaataagatgctgccgcacaactctcacaaatggcaaaagccatccccctttgactccgcaaacttactacttaacttcagagactggacaactgacaatgctctcctccaagagttgctactatcctatcccacaattaataaaaacaaacacaaaaatcactccgtccctcgtctaatacaagtttga

SEQ ID NO: 190848 - DNA, 1377 bp, Saccharomyces pastorianus
atgaatatgctcattgtcggtagagttgttgctagtgttgggggaagcggacttcaaacgctttgctttgttattggttgtacgatggttggtgaaaggtcacgtccattggtgatttccatcctaagttgtgcatttgctgtagctgctatcgttggtcctataatcggaggtgcctttacaacccatgttacctggaggtggtgcttctatatcaatcttcctatcggtggtcttgccattattatgtttttactcacatataaggccgagaataagggtatacttcaacaaattaaagatgctataggaacaatctcgagctttacttttagtaagttcagacaccaagttaattttaaaagacttatgaatggcataatcttcaagtttgacttctttggttttgccctctgctctgcagggctggtccttttcctactggggctaacctttggtggtaataaatatagttggaactctggccaagtcatcgcatatttggttttgggtgtcttactttttattttttcattggtgtacgatttcttcttattcgataaattcaacccggaacctgataatatatcctacaggcctctccttctaagaagattggtagcaaaaccagccataataataataaacatggtaacatttctattatgtaccggttacaatgggcaaatgatatactctgtccagtttttccaacttatatttgcgtcgagtgcatggaaagccggtcttcacttgataccaatcgttattaccaacgttattgcggccattgcaagtggtgtgattaccaaaaagctcggtttagttaaaccactcttaatatttggaggcgttcttggggtaattggagcagggcttatgacacttatgacaaatacgtccacgaagtcaactcaaattggtgttttgctattaccggggttttcccttggatttgctctacaagcatcgctcatgagtgcacagcttcaaattaccaaagatcgtccagaagctgctatggactttattgaagtaacagctttcaatacattcatgaagtcattaggtacaactcttggtggtgtgctttcaaccactgttttttccgcctcctttcacaacaaagtatcacgagctcatctagagccttacgaaggaaaaacggttgatgacatgattttgtatcgtcttcaaaactacgacggttctcattcgactattggaaacattttaagcgactccattaagaacgtattttggatggatctagggttttatgccttaggatttttgttttgtagtttttcatccaataagaaattaatcataccaaaaaaggacgagacaccagaagataatttagaagacaagtag

SEQ ID NO: 190849 - DNA, 1848 bp, Saccharomyces pastorianus
atgagttctagtgttgttggtgcctcaagtaataaaaaaagtggaattaggcagtcctgtgagattattgagcgagaacgtcactcaaacgatgacacgtactctatgacatcgaccttttttaagctcaaagaaaacgaaattatgtctgcacagtttgattccttgaaatataaaattctactgataagtaccgcgtttgtatgtgggtttggaattagtttagactacacacttagatcgacctatacgggctatgcgacgaactcatattcagaacactccttactttcaactgtccaagttatcaatgctgttgtaagtgtcggatcccaagttgtctactccagactctctgaccacttcggaagactaaggctttttttagttgcaactattttttatataatgggaaccatcattcaatcacaggcgacccgtctcacaatgtatgcagcaggatcggttttctataactgtggatacgtcggaacaaatctgctcctgacattaatactttctgatttctcctccttgaagtggagaatgttttaccagtacgcctcatattggccatatatcataataccatggatttcaggtaatattatcacagcagcaaatcctcagaaaaactggtcctggaatattgcaatgtgggcttttatttacccactctctgccttgccaattatatttcttattctttatatgaagtacaaatcttcaaagactgctgagtggagatctctcaaagaacaggctagaaaggaaagaacgggcggattatttgagaatttggtgtttctattctggaaactcgatattgttggcatattattaataactgtgtcgctagggtgtatccttgtccctttgacgttggctaatgagacatcacagaagtggcacaattcaaaaataattgccactttagtttcaggtggctgtttatttttcatttttttatattgggaggccaaatttgccaaatctcctcttctaccgttcaaattactaagtgatcgtggaatttgggcaccccttggtgttacttttttcaattttttcacctttttcatttcgtgtgactatctgtatcctgttttgctggtatcgatgaaagaatcgtccacttcggctgctcggatagtaaaccttcctgactttgttgctgctactgcatctccattctacagtttgttggtggcaaagacaaggaaactgaaactttctgtaatcggaggttgtgctgcatggatggtgtgcatgggccttttttacaaatacagaggaggatctgggtctcatgaaggtgttatcgctgcatctgttatcatgggtttgagtggtctcctatgcagcaattcagtgatcgtcatactgcaagccatgactacgcatagtaggatggctgtaataaccggcatccagtataccttttcaaagctaggcgctgctatcggtgcctccgtttctggtgccatatggacacaaaccatgcctaaccaactctacaagaaccttggaaacgatacattggcagaaatagcatatgcatcaccttatacattcattagtgattatccttggggctcacccgaaagagatgctgtggttgaatcttacagatatgttcaacgaataataatgacggttggcttggcatgtacggtaccgttctttgcgtttacaatgttcatgagagacccggaactaatagacaaggcgacacacgaagaattcactgaagatggtttggttgtcttgccagatgaggaaaatattttctctcaaatcaaggcactttttagacataatcgaagtaacaagaaattaggatgttga

SEQ ID NO: 190850 - DNA, 927 bp, Saccharomyces pastorianus
atggacgttgacactgcgtttctaaactcaaccatggatgagccgatctacgtaaaacaaccacccgggtttgttaacgagaggaatcccgactatgtatgggaactatacggcggtatgtatggactcaaacaagccccattactatggaacgaacatatcaacaatactcttaaaaagattggtttctgtcgacatgaaggcgaacatggcttatattttcgttccacatctgatggtcccatctacattgccgtatacgtagacgacttacttgttgctgctccctctcctaaaatatatgacagggttaagcaagaattaacgaaattatactcaatgaaggatctcggtaaagttgacaaattcctcggtcttaacattcatcaatcgtcaaacggagacatcactctctcccttcaagactatattgctaaagctgcatctgaaagcgaaataaacacatttaaacttacacagactccgctctgcaactcaaagcctcttttcgaaacaacttccccgcatctaaaagacatcactccttatcagagcatagttggtcagcttctcttttgtgcaaatactggtcgtccggacatatcgtatccagtctcattactctccaggttccttcgagaacctcgcgcaatccatttggagtctgctcggcgggttctacggtacctatataccaccagaagtatgtgtctcaagtatcgttctggatctcagttggcattaactgtatattgtgatgcatctcatggagctattcacgatctaccacactctactggggggtacgtgactctacttgctggtgctcccgttacgtggtcatcgaagaagctcaagggtgtgattcctgtaccatctactgaggcagaatacattactgcaagtgaaactgtcatggagatataa

SEQ ID NO: 190851 - DNA, 441 bp, Saccharomyces pastorianus
atgtatataatttacggagctgatcatcgcataagcaactgttctctgcttaaacgaagaataccagaagcacgaatctttaaattatatcctaatgacaaaacgagtagatcttcatctgctagtgtcgcgattcctgactatgaaacgcaaggccaaacagcaggacagataacaccgaagtcctggctctgtatgttatcttcgactgttccagctaccaaatcctcagaatggatttttgacacaggatgtacttcccacatgtgccacgaccgttccattttttcatcatttactagatcctctaggaaagactttgtcagaggagttggcggttccatacccatcatgggctccggaactgtaaacattggcactgttcaattacatgacgtatcttacgttcctgatttaccagttaacctgatatccgtttga

SEQ ID NO: 190852 - DNA, 744 bp, Saccharomyces pastorianus
atgacctataagctagatcgtaattcattacgtcaacaggttatgagccctcagagcaatgcttctgagaacataatcaatctatctagccccaacaattataaacagtggctgtacggtatcgagaccgctgctgaatatgctaacgaatatatgaacgaattcgttcataccggagatatccaatcaatgaaaagggattacaatctcagcgcgaatgatgaaagctttgtcaaaaccgtatttaacagtttcctggtaaagctctacaagaaaactatcgtgggtgaagctgcatgtgaaatgaactggatatgtgatgattcgcttggaagggtctctgcttatgatattttctcgcacttcgaagaaaactataatgaagtcactattggatccaggcttactcttatagaggacctaccaaatatatcctccaagcctgtagatgaaattgcttcctttttgaaaactctattcacgatgcttgaagacaatagcgaagaacaggacaaaaaaaaaagacgcgacaccaatatcgcgttgttattaatgaccttcttacccgagttaaaagaatcattccacgagaaattcggtgactctaaggctcttcagctatcacaagtcattagattctgtaaattaaatgcgtcatcgaattcatcatcttcggtctcagatgcattggttgcacaagacagaagaaactatcaaaagaaaggaaataagggatgtatataa

SEQ ID NO: 190853 - DNA, 1185 bp, Saccharomyces pastorianus
atggctgaaagtaccacgttagaaactattgagatacacccaattacttttccacctgaagttcttgcgagaatatctccagaattgtctttacaaagacacttatccctaggaatcaggccatgtctaagaaaatatgaagaatttagagatgttgctatagaaaataatactttatcgcgttatgcggatgctggtaatatagacactaaaaacaacattttaggctcaaatgttttgaaaagtgggaaaaccatagtcataacttctattacgggtggaataatagaagaaactagcgccgcgattaaagatttggatgatttcggtgaggaagaattgttcgaagtgaccaaagaggaggacataattgcaaattatgcttctgtctatccggtggtggaagttgaaagaggtagagtgggcgcttgcaccgatgaagaaatgactatatcacaaaaactacacgattccatattgcactctaggatattgcctaaaaaagccttgaaggtaaaagctggtgttcgtagtgcgaatgaagacggtacgttttccgtcttgtatcccgatgaattagaagatgatacgctgaatgaaacaaacctgaaaatgaaaagaaaatggtcatacgttttgtatgcgaaaattgtagtcttgagtcgcactggtccagtcttcgatttgtgttggaattctttgatgtacgctttacagagcgtaaagttacctagagcatttatagatgagcgtgcgtccgatttaagaatgactataagaacaagaggaagaagtgccaccataagagaaacgtatgaaattatttgcgaccaaactaagtcagtaccgttaatgataaacgcaaagaatattgcatttgcttcaaattatgggatagtggagttagaccccgaatgccaattacaaaactctgataactctgaagaagaggaagtggacattgatatggataaattgaacactgtgctaatagcagacctagatactgaagcggaagaaacaagtatacacagtacgatctccatcctcgctgctccttcaggtaactataagcaattaacattagtgggaggaggcgctaaaataacgccagaaatgataaaaagatcattgttgttatctagggttagagcggacgatttgtcaacaagatttaacatataa

SEQ ID NO: 190854 - DNA, 1002 bp, Saccharomyces pastorianus
atgggtattacagtaataggttctctaaactatgatttggacacatttacggatagattacctaacgctggagaaactttcagggctaaccacttcgaaacacatgctggtggtaagggattgaaccaagctgcggccattggtaaattaaaaaaccccagcagcagatatagtgttcgaatgattggtaatgttggaaatgatacatttggtaaacaattgaaggacactttatccgattgcggagtcgatatcactcacgtcggtacttacgaaggcattaatacgggtaccgctaccatactaattgaagagaaagctggtggccaaaataggatattgattgtagaaggtgctaacagcaagactatttatgacccgaaacagttgtgtgaaatttttccagagggcaaggaggaagaagagtatgttgtttttcaacacgaaattcctgatcctctttccattattaaatggatacatgcgaacaggccgaattttcagatcgtatataacccctcacctttcaaggccatgcctaagaaagattgggagttggtagaccttttggtcgttaatgaaattgagggtcttcaaatcgtggaaagtgtatttgataatgaacttgttgaagaaataagggagaagataaaggacgactttttaggagaatatcgtaaaatttgtgagcttttgtatgaaaaactcatgaatcgaaagaaaagaggaattgtggttatgactttgggttcgagaggggtgcttttctgttcgcacgaaagccctgaagtacaattccttccggctattcaaaatgtttcggttgttgatactacaggagctggagatactttcctgggcggtttggttactcaattgtatcaaggagagaccttgtctacggctataaagttctctacattagctagttcattgaccattcaaagaaaaggtgctgctgaaagcatgccactgtataaagatgttcagaaagatgcataa

SEQ ID NO: 190855 - DNA, 126 bp, Saccharomyces pastorianus
atgaattgttgtagaaggacgtctgtgatgttggagatatgtattttgttaactcttcttgagacgatttggccctggatagcgaagcgtgcggttacaaataggtcgtcttgttcaagaaggtag

SEQ ID NO: 190856 - DNA, 549 bp, Saccharomyces pastorianus
atgatattacttcatgccatatatactctttgggtaattatactacttccgctactcaatgcagagaaatttgtcccaaaagtaacggaggctcctatagaaacatcatttaatctagtgagttttgatgattccaacacttctatcagattagatggttggggggttgtatggataagtttcgacgctggagaaaattgggaaacggtcaaagaaattgaagagcgcattttcagatttactgttgatcctttccatggacaggaaagaggtttcgcttttatatgtgaatcacccaaattctacattaccgacgaccgtggggagtcatggagggctttaactataccctcatcagaagaatatttagatggcgactgttttataactactcatcctagaaacaaagaacttcttattgcgaattgctatagctatatgatagacgcagacgttttatatgacccaagtgaaatttacttgagcaatgatgggaatccttttttaaaattaaaccttccttggaaaagaaaaaagacgacgatataa

SEQ ID NO: 190857 - DNA, 375 bp, Saccharomyces pastorianus
atggtcaaattaacttcaatcgctgctggtgttgccgccatcgctgccggtattgccgctgccccagccactaccactctatctccatctgacgaaagggtcaacttggtcgaattgggtgtttacgtctccgatatcagagctcatttggctcaatactacttgtttcaagcagctcatccaactgagacctacccagttgagattgctgaagctgttttcaactatggtgacttcaccactatgttgactggtattccagctgaacaagtcaccagagtcatcactggtgtcccatggtactccactagattgagaccagccatctccagtgctctatctaaggacggtatctacactgctattccaaaatag

SEQ ID NO: 190858 - DNA, 1086 bp, Saccharomyces pastorianus
atgctttacccagaaaaatttcagggcatcggtatttccaacgcaaaggattggaagcatcctaaattagtgagttttgacccaaaaccctttggcgatcatgacgttgatgttgaaattgaagcctgtggtatctgcggatctgattttcatatagccgttggtaattggggtccagtcccagaaaatcaaatccttggacatgaaataattggccgcgtggtgaaggttggatccaagtgccacactggggtaaaaatcggtgaccgtgttggtgttggtgcccaagccttggcgtgttttgagtgtgaacgttgcaaaagtgacaacgagcaatactgtaccaatgaccacgttttgactatgtggactccttacaaggacggctacatttcacaaggaggctttgcctcccacgtgaggcttcatgaacactttgctattcaaataccagaaaatattccaagtccgctagccgctccattattgtgtggtggtattacagttttctctccactactaagaaatggctgtggtccaggtaagagggtaggtattgttggcatcggtggtattgggcatatggggattctgttggctaaagctatgggagccgaggtttatgcgttttcgcgaggccactccaagcgggaggattctatgaaactcggtgctgatcactatattgctatgttggaggataaaggctggacagaacaatactctaacgctttggaccttcttgtcgtttgctcatcatctttgtcgaaagttaattttgacagtatcgttaagattatgaagattggaggctccatcgtttcaattgctgctcctgaagttaatgaaaagcttgttttaaaaccgttgggcctaatgggagtatcaatctcaagcagtgctatcggatctaggaaggaaatcgaacaactattgaaattagtttccgaaaagaatgtcaaaatatgggtggaaaaacttccgatcagcgaagaaggcgtcagccatgcctttacaaggatggaaagcggagacgtcaaatacagatttactttggtcgattatgataagaaattccataaatag

SEQ ID NO: 190859 - DNA, 2499 bp, Saccharomyces pastorianus
atggattcgattacagtaaaaaaacctcggttaagattggtttgcctgcaatgcaaaaagatcaaacggaaatgtgataaactgcggcctgcttgctcgcgatgccaacaaaattcattacagtgtgaatatgaagagagaacagatttatctgccaatgttgcagcaaacgactctgatggattcaattcctctcataagctcaatttcgaacagcaacctgtacttgaaaggactgggcttagatattccttacaagtgcctgaaggtgtcgttaatgctacgctgtcgatatggaacgccgaagatatgctagttatagtaggattagttacatttctggattatccttttgctgcgcatagtctggcgcaacatgaccagtatatcagggcactttgtgcttcgttgtacggcatggcgcttgttgactttagcaattatgctaatggtattccttgtgaagacacatcaagaagtatactaggaccattgtcattcatagaaaaggccatttttagacggatagaacatagtaagcaatttcgagttcagtctgccgccttagggttattatacaatgcattttcaatggaagaagaaaacttctcgactcttctaccgtcactcatcgctgaagtggaagacgtgttgatgcaaaaaaaagactgtgaaatacttttgaggtgtttctatcaaaatatttatcccttctatccttttatggacatttcactctttgagagcgatctcactagtttgcttttacaagacgacaataatcgttggaaaattagtactgaagttaaaaatgtgcgcaaaaaaatagaaactttgtcattacttacaatagtaatggccatggccttgatgcattcaaaattggatgcaaatcttctttcaatggtaaaagaaaatgcctccgaaagtgccaggaaactttctcttttatgtcataaactattatgcctcctggatgtatttcgctatccaaatgagaacacttttacttgccttttatatttctacgtttcagagcatttagatcccgagagtcccgattgtgtactgagccccactaacttgcttactctgcaccatcttttaaatttgtccatgaccttaggtcttcaatatgagccttcgaagtacaaacgtttcaaagatccagaagtgataaggcagagacggatattatggttaggagttcagtcattactttttcaaatttctcttgctgaaggtgatgctggtaaatcaaatagtgaatatatggaggcatatttaacagacttcgaagaatatattgaagcttcctcagagtatgaaaaaagttctgcgagtgaatcgaacgtgcaaatgaatgatattgtttggaataagtacaaatttcacgtcattttgagtaaactaatgtctgattgcacttcagttatacaacatccgcagcttttccacattttaggaaatattaaaagatctgaagattttatggctgagaactttcctacaagttcgatttaccaaccccttcatgaaaaggaaccaaatgcgatcaaagttggcaaaagtacggttctcgatgtcatggatattcaaaaaactgaaatatttcttacaaatattgtgggaagtatgtgttttttaaacatttttgatgtcctatcgttacattttgaaaaaaaatgtgttatgcactgggaagaatatgaaaagaactatcatttccttactttgaaaagtttcaatgcatacttaaagctagcagggttgatatctgattatctcgagaataagtttcaagggaacattttagagagtcgcggttatatcatagataaacaaatatgttttatgcttgtaaggatctggatgttccaatgtcgtattttgttaaggttttcatacaagcaagaaagtcagaaaaaattggcctcttccagtatatccactaacgataatgaaaaagaagatgaaatgattgtcattttagaaagacttattaaacacattcgtaaccaaatggcacatttagtggatctagcaaagggaaaacttcaagatagttactttggtgcttaccaaactgttcccatgtttagatacgttgtgtatttgatcgatgttggcggcttagtatctgtgacaaatgggttttgggataagatttccagtgatggtgaaataccgccaaaagtacaacaagccgtgagattgaaatggggattggactgcaataattcgagaagaatcaaacaaaagttaataagcagccagagtttgcagagtttcaatcaagttctgttgtgccagatggaggatgcagttctctccagttccttcgcaataaaagccaataccgctatgtcccaaaacacggctgaagaatttttcaatatcagcgaagaagaggctttaaatcaactattggaaaacaacaattttgatgccttctgggatttattaggtgaaaatctgagcgatatgccttctttgtga

SEQ ID NO: 190860 - DNA, 1092 bp, Saccharomyces pastorianus
atgattgggtccgcgtccgactcatctagcaagttaggacgcctccgatttctttctgaaactgccgctattaaagtatccccgttaatcctaggagaagtctcatacgatggagcacgttcggattttctcaaatcaatgaacaagaatcgagcttttgaattgcttgatactttttacgaggcaggtggaaatttcattgatgccgcaaacaactgccaaaacgagcaatcagaagaatggattggtgaatggatacagtccagaaggttacgtgatcaaattgtcattgcaaccaagtttataaaaagcgataaaaagtataaagcaggtgaaagtaacactgccaactactgtggtaatcacaagcgtagtttacatgtgagtgtgagggattctctccgcaaattgcaaactgattggattgatatactttacgttcactggtgggattatatgagttcaatcgaagaatttatggatagtttgcatattctggtccagcagggcaaggtcctctatttgggtgtatctgatacacctgcttgggttgtttctgcggcaaactactacgctacatcttatggtaaaactccctttagtatctaccaaggtaaatggaacgtgttgaacagagattttgagcgtgatattattccaatggctaggcatttcggtatggccctcgccccatgggatgtcatgggaggtggaagatttcagagtaaaaaagcaatggaggaacggaggaagaatggagagggtattcgttctttcgttggcgcctccgaacaaacagatgcagaaatcaagattagtgaagcattggccaagattgctgaggaacatggcactgagtctgttactgctattgctattgcctatgttcgctctaaggcgaaaaatttttttccgtcggttgaaggaggaaaaattgaggatctcaaagagaacattaaggctctcagtatcgatctaacgccagacaatataaaatacttagaaagtatagttccttttgacatcggatttcctaataattttatcgtgttaaattccttgactcaaaaatatggtacgaataatgtttag

SEQ ID NO: 190861 - DNA, 192 bp, Saccharomyces pastorianus
atgccatactcaccttcacttatattgatggggcatacgcacacggatgctacagtatataccactctcaagttaccctactctcacactccaatccatggcccattctcactaaatcagtaccaaatgcacccacatcattatgcacggcacttgcctcagcggtctataccctgtgccatttacccataa

SEQ ID NO: 190862 - DNA, 1701 bp, Saccharomyces pastorianus
atggttacagaaaatcctcaacgtcttactgttttaagacttgccaccaataagggtccattagcacaaatatggcttgcttcaaatatgtcgaatataccaagaggatcggttatccaaacacatattgctgaatcagcaaaggaaattgcaaaagcttctggctgtgatgacgaatcaggggacaatgaatacataactttacgaacatctggcgaattacttcaaggcattgttcgtgtatattccaaacaggccacttttctccttacagatataaaggacacattaacgaagataagtatgttatttaaaacaagccagaagatgacttctacagtaaacagactgaacactgtaacaagggttcatcaattgatgttagaagatgccgttacagaaagagaagttttggtcaccccagggttagagttcttagatgatactactataccagtgggcttaatggcgcaggagaattcgatggaaagaaaagtccaaggtgctgctccctgggatacttcacttgaggtcggtagacgattcagtccagatgaagatttcgaacataataatttgtctagtatgaaccttgattttgacatcgaggaaggtccgataacttcaaaatcttgggaagaaggaacaagacaaagctcacgcaactttgatacgcacgaaaattacatacaagatgacgatttccctcttgatgatgctggaactattggttgggatctagggattaccgaaaaaaatgaccagaacaacgatgatgacgataactctgttgagcaaggaagaaggctaggtgaatcaatcatgtctgaggagcctacggattttggatttgatctggatatagaaaaagaagcacccgcaggcaatatagatacgataaccgatgccatgacagaatcacagccaaaacaaactggcacaagaaggaactcaaaattactgaataccaaaagtattcaaatcgatgaagaaacagaaaattcagaaagcatagcttcatccaatacatacaaagaggagagatcgaataatttattgactccacagcccaccaattttacgactaaaagattatggagtgaaataactgaaagtatgtcctatttaccagatccaatccttaagaacttcttatcctacgaatctctaaaaaaaagaaaaatacataatgggcgagaagggtcaattgaagaacctgagttaaacgtgtcgcttaatcttaccgacgatgtaattagtaatgcgggaacaaacgataactccttcaatgaactgaccgataacatgtcagacttcgtaccaattgatgctggcttaaatgaggctccttttcctgaagagaatatcatcgacgcaaagactagaaatgagcaaactaccatccaaactgaaaaagttcgtcctactcccggtgaggtggcttctaaagctattgttcaaatggcgaagattttaaggaaggaattaagcgaagaaaaagaagtaatattcacggatgtactaaaaagtcaagcaaatacagaaccagaaaatattactaaaagagaagccagtagaggatttttcgatattttatcacttgctacagaaggatgtattggtttgagtcaaacagaagcattcggaaatattaaaatagacgccaaacctgcactatttgaaaggtttatcaatgcttaa

SEQ ID NO: 190863 - DNA, 987 bp, Saccharomyces pastorianus
atgagccaacagaatatactacattatgatatggatgttacttccgtatcatgggtcaaggataacacataccagattactattcatgtcaaagccgtaaaagatatccctttgaaatatttatggtctttaaagattattggtgtcaacggtccctcaagcaccgtacaactttacggcaaaaatgagaagacatacctaatcagtgatccaacagattttacatccacttttcaggtttatgcttacccttcttctgacggttgcacagtttggatgccaaatttccaaatccagttcgaatatctacaaggtgatgctgctcagtactggcaaacttggcaatgggggacaaccaccttcgatttatcgacaggttgtaacaattatgacaatcaaggccactcacaaacggatttccctggattttattggacctaccagtgcaagggaaacaatgatggcacttgtacaaaagcctcgtcttcatccattactacttcatccattactacttcatccactactacttcatccactactacttcatccactactacttcatcctctactacttcatcctctactacttcatcctctactacttcatcctctactacttcatcctctactacttcatcctctactacttcatcctctactacttcatcctctactacttcatcctctactacttcatcctctactacttcatcctctactacttcatcctctacgaaaacttccactactacgtcatctactgtgaaaagctcttccactacatccattgattttactacttccgttgactcacatacttcatcaagcgtagccgatatttatcgttcaagaacatctactgatgtcaccacattagcagcttcaactagtcctttcagcagtttcacttcaagtgactctagtagttcaagcgatgtaaccagttcaaccattcaaactacttctgttgatccaaccacttaa

SEQ ID NO: 190864 - DNA, 584 bp, Saccharomyces pastorianus
atgagtagtttgtgtctacagcgtcttcaggaagaaaggtaagtagtagttttcctccttttatgcttacattctgtaggcatacacaatttcatccagcggtatactaacaaatcgatgaacttaacttgttttacttgaataacagaaaaaaatggagaaaggatcatccatttggattttatgccaaaccagttaagaaagctgatgggtccatggatttacagaaatgggaagctggtatcccaggcaaagaaggtacaaactgggcgggtggtgtgtacccaattacagtcgaatatccaaatgaatatccttcaaaacctccaaaggttaaatttccagccggattttatcatccaaacgtgtatccaagtggcacaatatgtttaagtattttaaatgaagatcaagattggagacccgccatcacgttaaaacaaattgttcttggggttcaggatcttttagactctccaaatccaaattcccctgctcaagagcctgcatggagatcattttcaagaaataaggcggaatatgacaagaaagttttgcttcaagctaaacagtactctaaatag

SEQ ID NO: 190865 - DNA, 2955 bp, Saccharomyces pastorianus
atgggtcctgccatacataatcaactatatgaatgtggattaaagactacgtctcaagatggcttcttgatggacaattatgaaactcaattatttcaatcgttgaacaggtttatcaatttcataaacaatgctaatcagtcagctagtaataaagaacaaaatacaaaattttgcaaatcctcctcaaattttttacgcttgaaactactaacggttctaagacaatggtgtgattcttcacgaagcaactgtacactggaggttagagatgttttgacccaatggtgggtcacacttttaaactttctaaattctgacacctcgcttcaaatagatactgcccttgaattgagcttgagcatagaactaacttccgtgtgtctcgagtgcctcagcaaaattatgaccatactaataatattgcctttccattcatccagagacatggaaatatactcacatcatcttttgctgaccattcattgcataacaaacaagttgattttgatttctaaaaactccaaaaaacttaaacgtacaaatagtgatgacaagtgctctataaacgacaagaagctgcaataccttaacaaatattcttccttgctgcgagcattcatcgggaagttaaatgcttacgcatttttttatctaccagaagactttcatttcgatacaattttgttattgacagtttctcctcaaatctcttcaagtattcaaacatctttgttttcatggaagaagagacaatataaattcaccgacgatcagggacaaatgatccgcactgaagcttttgaaaataaagatactaaattttttaagatcattgtttcttatattaaaaatgattttgtacttatgtcattttattggcactattggtatatcatacttcaatttatgaaattctctgattcagatgtaggaattaaaaaatcgacattgtcatgcatacctggctcagaaattttattgacgcatgtaaccactagattcttgaattcagatttgaataaattcacgcggattattaaacaaacgccgaatccaaggatagcaaatgagaatgtgacagagtcacatccaaatttcaagagtttgaatagtagcaatgctttaattacatctgaaaggattaatgattacgtattttctaattttaagacaatcaaattatgggaatgtcttagaagcctttcaggatgcattcttaaagaaaatcatccggaatacctggaaaatatgctttccttacatgagtctctattgatagactatgtctccactatttcagcgtacgattatattgcagcgaacgtcatttacaataaggttctccagtttattattttccagtttgaaagtttaccttctctgaaattcattcaatggaggtcgtggtacaatgggcttttgagtatgttaaggaccaaaaatgttaactgccagactgtttctttattatgccttttcaatatttggaagcacgtaaccattgaggaccgcgatgaaatagtaaaagtgctgttaagtgatttttgggagtcattgatttttgaaaacgaatttcctttgattagaattttatttatgaaggtattagtttttaaaatcattccaagtgttcaaaattcttcttcattacgattcttgccacatgatagaattaaacaactatatgaagagctactggtaaacaaggaggagttatttgagatgcaaaaacacgattcaaatgatatagtggcgcatagaaagaatgctctcgtttttaatggtaactcacgtttgatgatgattccaaaaaaaccaaatacagaggaccacttagtttataagattaatcatgataaaaatttaactacagaaagatttccctctgtcagctcagtggcaaatacaagacctaacgttatcttgaaaaatggtaaatacgcttatgatattttggacgaaatgacaagtaaagctgcctttcttcttgcagaaaagaagacccgactaaatcccaaaaaaaatcacaaaattatggatggctacgaaggaggtcaggaaaacgaagataatgatgaagactcagaagatagtggctcgcataaaaataagagaaaggaaggtaatagttctttatcggcaacactgaacacttggctttcaaaattttcaagtacttctgaagattcacagaagaagaaggaacaggcaaatgaattaggcaacgattttgaatatgatgaagatgtggctgattttgcagaaattttgccgaagcagtcatctagtaatattgaaaaaatttttaagcatggtaacaattcaggatcaatggtatcatataattcaagtatcaagctcaataggagggagaatatattgataggtccaccagagttgagattttctaatgaaatcaaggaacacaatagtattgctacaatattcaaactggtatttattcaaaccaatagaagagtcgtcgaaaaaatagatttggcgaacatgaaatgggggacaatccacggaggcagtaagtacatgaagcctttacccgtcccgaaagatttggttgcgagtgttgctaagaacgaaagtgagacgagaaacttagctaccttatgcggtaatggtctagattttgagataccggtgcctgattttaatatttttggcaaatgtatggaagatgagcaagatgtagccaaaattggtaatcagaatgtggaagatttgaaagttactggggggcgggaggtgacaatttggaagcagatccaagatatgaagttgagaacaaggatacaaaaaatctgtgttttaattgagacgttcaatgctacagtaagagaatattttgagttttccaatcgattagagcatgacggtatatttatagattttgaagtgaggaaacctagtagtaataattctattaatatcaaagtctga

SEQ ID NO: 190866 - DNA, 510 bp, Saccharomyces pastorianus
atggcagtaaatatcagcaaacagccaactagaagcttttccttagatgaagtaactgttcgtaatgaactcaaattatcacagggttttgttatgagaaaagacctcaaagggccgcgtttaatagtcacatcggggatgggatccaccttcagcaaatgctctttattcatctttaaagcagttatgatcttacacacctgcttaattgttaaatcaataagaatattttcgaaaaagaagaaaagaaacgggtctatgcataatatgtactacgcttctgttccttttctattgttctcgaatgcctattcgatagacttttcgcggcacgtaaacgagttcttggaaaaaaaacggtgcgaaatgataataccactgaaactacttgcagatcatacttatttgagcgaaatagaatacgtgtctctaaacgcagatggacaatatagtcagcttcaagacattttttttattcatgatgttttttttgtctattttcgtttttaa

SEQ ID NO: 190867 - DNA, 2454 bp, Saccharomyces pastorianus
atgtcggaagagaaaacgtacaaacgtgtagagcaggatgatcccgtgcccgaactggatatcaagcagggccccgtaagaccctttattgttaccgatccgagtgccgaattggcctcgttacgaaccatggtcactcttaaagagaagctgttagtggcctgtcttgctgtctttacagcggtcattagattgcatggcttggcatggcctgacagcgtggtgtttgatgaagtacatttcggtgggtttgcctcgcaatacattagggggacttacttcatggatgtgcatcctcctcttgcaaagatgttgtatgctggtgtggcatcgcttggtgggttccagggtgattttgacttcgaaaatattggtgacagctttccatctacgacgccatacgtgttgatgagatttttctctgcttctttgggggctcttactgttattttgatgtacatgactttacgttattctggtgttcgtatgtgggttgctttgatgagcgctatctgctttgccgttgaaaactcgtacgtcactatttctcgttacattctgttggacgccccattgatgtttttcattgcagctgcagtctactctttcaagaaatacgaaatgtaccctgccaactcgctcaatgcttacaagtccttgcttgctactggtattgctcttggtatggcatcttcatccaaatgggttggtcttttcacggttacatgggtgggtcttttatgtatctggagactatggttcatgattggggatttgactaagtcttccaagtccatcttcaaagtagcatttgccaaattggccttcttgttgggtgtgccttttgccctttatctggtcttcttttatatccacttccaatcattaactttggacggggatggcgcaagcttcttttcgcctgaatttagatctacactaaagaacaataagatcccccaaaatgtcgttgctgatgtcggcattggctccattatcagcttgcgtcatctctctaccatgggcggttatttgcattctcattcacacaattatccagctggttcggaacaacaacaaagcactttatatcctcacatggatgccaataacgattggttgttggaactttacaacgcacccggcgaatctttaacaacattccaaaacctaaccgatggtaccaaggtcagactattccacactgttacaagatgtagattacactctcatgaccataagccacccgtttcagaaagcagcgactggcagaaggaggtttcttgttatggttacagcggattcgacggtgatgctaatgatgactgggttgttgagattgataaaaagaattctgctcctggagttgcccaagaacgggtcatagctttggacacaaagtttagattgagacatgctatgacaggctgttatttgttttcccacgaagtcaagttgccagcttgggggttcgaacaacaagaagttacctgtgcctcctccggtagacatgatttaacattgtggtacgttgagaacaacagtaacccattgttaccagaagataccaagcgtatttcctataaacctgcaagcttcatttctaaatttattgaatcccataaaaagatgtggcatatcaataaaaatttggtcgaacctcatgtttatgaatcacaaccaacttcatggccattcttgctacgtggtataagttactggggtgaaaataacagaaacgtctatctattaggtaatgcgatcgtatggtgggctgtcaccgctttcatcggtattttcggattgattgttatcactgagctgttctcgtggcagttaggtaaaccaattttgaaggactccaaggttgttaacttccacgttcaggttattcactacttattgggttttgccgtccattatgctccatctttcttaatgcaacgtcaaatgtttttgcatcactacttacctgcttattatttcggtattcttgcccttggccacgccttggacataatagtttcttatgttttccgcagcaagagacaaatgggctacgcggtagtgatcactttccttgctgcttctgtgtatttcttcaagagcttcagtccaattatttacggtacaccatggactcaagaattgtgtcaaaaatcgcagtggttgtctggttgggactacaattgtaacacatacttttcttcattagaagagtacaaaaaccaaaccttgactaaacgtgaatctcaacctgccgccactagtacagttgaagaaatcactatagaaggggacggtccgtcgtatgaagatctcatgaacgaggatggcaagaaaatctttaaagacacagaaggtaatgaactagatccagaagttgtcaaaaaaatgttggaagaggagggagctaacattttaaaagtagaaaaaagggctgttttggaataa

SEQ ID NO: 190868 - DNA, 327 bp, Saccharomyces pastorianus
atgtattgcgaggcaaacccaccgaaatgtacttcatcaaacaccacgctgtcaggccatgccaagccatgcaatctaatgaccgctgtaaagacagcaagacaggccactaacagcttctctttaagagtgaccatggttcgtaacgaggccaattcggcactcggatcggtaacaataaagggtcttacggggccctgcttgatatccagttcgggcacgggatcatcctgctctacacgtttgtacgttttctcttccgacatgaccgtgcttgtagctgttagctgtttcttgataggctcttctgatactacctcgctttaa

SEQ ID NO: 190869 - DNA, 768 bp, Saccharomyces pastorianus
atggtatgtagagatgaatatacatgaaacggacgtgatataatgtgctatggaagaaaaaagtctcctttaatgtctgcaggataaataatcaagtggtctgaagaaaatttacagctacagtattactgcaaaccttgcaggcaaatatcagagagatctcaccagctacaacttggtaacagaaatttataagtttatggcacttgttaaaattgtttggaagttttcgaaattataatattggtcttcagaaacctggaaccacatgtgaactattttttttggataatgcattgcacagagcgtattagtgtatacgagaatctaaaaatttgaaactggctcataaaaacaggaacttttactaacagttatgattttttgttcccattttcttatcaataggccggcgttaaagcttacgaactaagaaccaaatccaaggaacaattagcttctcaattggttgacttgaaaaaggagttggctgaattgaaggtccaaaagttgtccagaccatctttgccaaagatcaagaccgtcagaaagagtatcgcctgtgtcttgaccgtcatcaacgaacaacaaagagaagctgttagacaattatacaagggtaagaagtaccaaccaaaggacttgagagccaagaagaccagagctttgagaagagctttgaccaaattcgaagcttcccaagttaccgaaaagcaaagaaagaagcaaatcgctttcccacaaagaaagtacgctatcaaggcttaa

SEQ ID NO: 190870 - DNA, 1587 bp, Saccharomyces pastorianus
atgtctgctaaagttccatctaacgccacgtttaagaacaaggaaaaacctcaagaggttcgcaaagccaacatcatcgctgcacgttctgttgcagatgccatccgtacttcattgggtcccaagggtatggacaagatgattaagacatctcgtggagaaatcatcatctctaatgatggccacaccattctaaaacagatggccattctgcatccggtggccagaatgctagtagaggtttctgccgcgcaggactcggaagccggtgatggtaccacttctgtggtgatcttgaccggagctctattgggtgctgctgagaggctgttaaacaagggcatccatccaaccatcattgcggactcctttcaaagtgctgcgaagagatctgtcgatattcttttagaaatgtgccataaggtttcgttgagcgatagagaacagctggttcgtgctgcatccacttctttgagttccaagattgtgtctcaatactcttcgtttttggcgcccttggcagtggactccgtattgaagatatctgatgaaaactctaagaatgttgacctgaacgatatcagactggtcaaaaaagttggtggtaccattgatgacacagaaatgatagatggtgtggtcttgacacaaacggcaatcaaatctgctggtggtccgacaagaaaggaaaaagcaaagattgggttaattcaattccaaatatctcctccaaagcccgacacagaaaataatatcatcgttaatgactatagacaaatggataagatccttaaagaagaaagagcgtatttgctaaatatctgtaaaaaaattaaaaaggccaagtgtaacgtgctgttgattcagaaatccatcttgagagatgcggtaaatgatttggctcttcatttcttgtcaaaattgaacataatggtggtaaaggatatcgagagagaagaaatcgagtttctgtcgaagggcttgggttgtaagccaattgctgatatagaattgttcaccgaagatagattgggttccgctgatttagttgaggagatcgatagcgatggttccaagatagttagagtaactggtataagaaacaataatgcaagaccaaccgtctctgttgttattcgtggtgcaaacaacatgatcattgatgaaacagagcgttccctccatgatgcactatgtgttattcgttgtctagtgaaagagagaggtttaatcgctggtggtggtgctccagaaattgaaatatcccgtaggttgagtaaggaagcaaggtctatggaaggtgtacaggcttttatttggcaagaatttgcctctgctttggaagttattccaacgactttggctgaaaacgcaggtttgaatagtatcaaagttgtcacagaattgcgctctaagcatgaaaatggtgaattgaatgacggtatctctgttagacgatctggtactacgaacacctatgaagaacacatcttacaacccgtacttgttagtacaagtgcaattaccttagcgtctgaatgtgttaaatccatcttacgtattgatgatattgcattcagccgttaa

SEQ ID NO: 190871 - DNA, 366 bp, Saccharomyces pastorianus
atggctaagacttcttcctcatcttcgtcttctaacagagaatggtcatcatctttattactgtcgccaaaggtggattgtccaagtaaaaccttttcccttttagaagcaaaatcatcaacttcgtttaaaccatacggattaatctcatccccaacttcagaggtcttagttctgtttgagcctttgcgtaccatattattctatacacccactctaatatgttttctcttcctccaaaactttttgtataaaagcatcagtgagatgagctatgatgagatgagcttcattattgaattttttttcattgcagaagcgcagtttgaaaatttttcatccgccctgcaaagtccaattttttga

SEQ ID NO: 190872 - DNA, 854 bp, Saccharomyces pastorianus
atggtatgtttgagatgaacaaaataataaagactgacaactgcagaacagagaggatcatagcaacctagtgcaagaaagagcctcgaagcgttaaacttttggaacgtaattcatccgttggctatgtctattcaatacagttagaatacgaaagctgtaatcaagtatatcggattattcgcaagcaaagaatcaaggaaaagaaagtgaaaatagcatacatctttaaattcagaggttttgctgaattttaatagggaagtttacgttatgattgttggccgtagatcgcctagcgtttgaccaaatttaattctcctaatttttttattgtaaaaaagccttccaacgaaataaattagttattggttttttttctctgttacgagggatatatgatgcctgtgcttgttagttcattataagtgctaataaaatactaacgttaataaaaatttggaatattatttcattttttatcctattaataggccggtgttaaagcttacgaactaagaaccaaatccaaggaacaattggcttctcaattggttgacttgaaaaaggagttggctgaattgaaggtccaaaagttgtccagaccatctttgccaaagatcaagaccgtcagaaagagtatcgcctgtgtcttgaccgtcatcaacgaacaacaaagagaagctgttagacaattatacaagggtaagaagtaccaaccaaaggacttgagagccaagaagaccagagctttgagaagagctttgaccaaattcgaagcttcccaagttaccgaaaagcaaagaaagaagcaaatcgctttcccacaaagaaagtacgctattaaggcttaa

SEQ ID NO: 190873 - DNA, 621 bp, Saccharomyces pastorianus
atgcacaaaaaaaaaattgaaaacggtcgcatttttgatctaaatggaccaacgatgaaggaactgctttactatacattcattgaaactgaagtgactggtgcatttttggtgtttagggaaaagactcaaaaccttgtttttgcctcgttaggtaatgataagctttttttattgggaaaggtggaaggcttcttgaagaaacatgagaaacaggatacaatgtacgatttacaggaactaaaagaggcagaaacatataagaaatcaatcgaaaattatacaatatgtttagaaaacaaaatgccattaccatcgggcgctattccctttgagttcctgtttggaacagattttcaacgtaaagtttggaatgagcttttaaacgtggaacacggccacgtcgtaacatatggtgatattgcaaagagaatagggaagccaactgccgcaagatctgtcggaagagcttgcggctcaaataacctggcattgttagtaccttgccatagaatcgttggtagcaatagaaaattaaccggatataaatggagctgtaaactgaaagaacagttattaaataatgaaaaggaaaatagcttaagccttagtagattgtag

SEQ ID NO: 190874 - DNA, 861 bp, Saccharomyces pastorianus
atgaaagccaagccactaagccaagatccaggctccaagcgttacgcataccgtataaataaggaagaaaatcgtaaggagttgaagcatgtaaagatcaatgaaagttctttggtgcaagaaggccaaaagatcgacttgccaaagaagagatattatcgtcaaagggcgcattccaacccattttcagatcaccagttagagtacccagtatctccccaggatatggattggtccaaattgtacccttactacaaaaacgcggaaaatggacaaatgacaaagaaggtgacgattgctgatattggctgtggattcggtgggttgatgatagatttatcaccagccttccctgaagatcttatcttagggatggaaattcgtgtgcaggttacaaattacgtggaggatagaattattgccttaaggaacaatacagcttcaaaacatggatttcaaaacattaatgtcttgagaggtaacgctatgaaattcttgcccaacttttttgaaaagggccagctttctaaaatgtttttttgtttccccgatcctcatttcaaacaaagaaagcataaggcaagaattatcactaacaccttgctgagtgagtacgcatatgttttgaaagagggcggtgtcgtgtacacaattacagacgtcaaagacctgcatgagtggatggtaaaacatttagaagagcatcctttatttgaacggttgagcaaagaatgggaagaaaacgatgaatgtgtgaaaataatgagaaatgccacagaagaaggtaaaaaagtggaaagaaagaagggtgacaagttcgtcgcttgtttcacaagattaccaacgccagccatattgtaa

SEQ ID NO: 190875 - DNA, 1074 bp, Saccharomyces pastorianus
atgtctcaaaatagtaaccctgcagtagttctagagaaagtcggcgatattgccatcgagcaaagaccaatccctaccattaaggacccccattatgtcaagttagctattaaagccactggtatctgcggctctgatattcattattatagaagcggtggtattggtaagtacatattgaaggcgccaatggttttaggtcatgaatcaagcggacaggttgtggaagttggtgatgccgtcacaagggtcaaagttggtgaccgtgttgctattgaacctggtgttcctagccgttactctgatgagaccaaagaagggagctataacctttgcccacatatggcatttgctgcaactcctccaattgatggtactcttgtgaagtactatttatctccagaagatttccttgtgaaattgccagaaggcgtcagttatgaagagggcgcttgtgtcgaacccttatcagtcggtgtacactctaataaattggctggggtccgctttggtaccaaagttgttgtatttggtgcaggtcctgtggggcttttaactggcgcagtcgcccgcgcttttggtgccaccgacgtcattttcgtcgatgtattcgacaacaagctacagagagcaaaagatttcggagccacaaacactttcaattcttcccagttttccaccgataaagcccaagacttggccgatggggtccaaaagcttttgggcggaaatcacgcagatgtggtgtttgagtgttcaggtgctgatgtttgcattgatgccgctgtcaaaacaactaaggttggaggtaccatggtgcaagtcggtatgggtaaaaactacactaattttccaattgctgaagttagtggaaaggaaatgaaattgattggatgtttccgttattcattcggtgattatcgtgacgctgtgaacttggttgccacaggaaaagtcaatgtcaagccattgataacccacaaatttaaatttgaagatgcagccaaggcttacgactacaacattgcccatggtggagaggtagtcaagactattatctttggtcctgaatga

SEQ ID NO: 190876 - DNA, 75 bp, Saccharomyces pastorianus
atgcattcaaataatagtcgccaaatactgatacctcatcaaaatgaaaatatgtttctaacggaactgtattag

SEQ ID NO: 190877 - DNA, 1152 bp, Saccharomyces pastorianus
atgaaagagaatgaagtcaaagatgagaaaagcgtagatgtgttatccttcaaacagctcgaatcccaaaagattgttctacctcaagatcttttcagaagcagctttacctggttttgttatgaaatttacaagtccttagcgtttcgcatctggatgctattatggctaccacttagcgtctggtggaaactttccaacaattgtatttacccacttatagtttcacttctggtcctgtttctgggaccaatatttgtccttgttatttgtggactttctcgtaagcgttccttatcgaaacaactcattcagttttgcaaagagattactgaaaacacaccaagttctgatcctcatgattgggaagtcgttgtagcaaatctaaattcgtacttatatgaaaataaggcttggaatactaagaatttctttttcaatgctacggattgtgagaaaatgttcagaacaactgttcttgaaccattttctttgaaaaaagataaagctgccaaggttaagtcatttaaggattctgtcccttatatcgaagaggctttgcaagtgtatgctacaggatttgacaaacagtggaagttgtttattactgaaaaatcatggagccctgttggcctggaagacgttcagcttcccaaggatattcatcggtccaagcttacttggtttttaaagcggattttcactatttactctctaccattatggcttgcttttttgaactgtatctgcgtgtcacagcatttttgccttgcatttcgtatcttgtgtcctggattgtttttcctcatgatggtgtggcttttccaaaatatgaggacgactgctttactcgtgaaaatggaacacaagatgcaattcttgttgactattataaatgagcaagaaagtggtgcgaatggatgggacgaaattgcaaggaaaatgaataggtacttgtttgagaaaaaagcctggaagaatgaagagtttttcttcgacgggattgactgtgaatggttttttagccacttcttctaccgccttctatctgcaaagaaatctatgtggcttttaccattgaatgtggaactatggccatatattaaagaagcgcaattgtcccgcaatgaagagtctttaatgaagaaatga

SEQ ID NO: 190878 - DNA, 1944 bp, Saccharomyces pastorianus
atgagagcatatggaaagaggggcccagttctcagaactccttttagatctaataaaggcttgccatcttcttccgatgttgaatttagtgatgacgatgtaaactccgtgattcctgatgtaagttctaccatttcgagcagtattgcagaccacccgatagagggattattggacgagcctagaaaggctcaggacagctcgtcgtcatttgatggtgcaaatgagaagccctcttcacaactggactcaaaaaggaatgaccaaaacgtcaaaattatcactagcagtgatacctcaatggcatttatgaaagatgaaaagttaagtgcctttaatttccttgatggttcaaaggcatctaagagaaaaagaagaagaacttaccaaaagcatgatgcgaacataacgtcttcaattgaaccagacgtacaagatgaagacagcattacaatgcacaatgaatttgaatcaataaggaaaatatacaatgacatcaatgaattcatattgaagctaccgagagctgacgatgatatactgaataaaatgcttgaaaatgagatgaagatggacgactctatagagaataatagcatacgcacatccaaagacaaaaaatatggcaaatttagaacaatattaataaacaaaaataaagaaaatgaaataatgggagaagaggtagatcagaaagctaacaccttgtccctaaataacgctgacaacagtaatgctgaaaaagaaggattaacttcaacaaatcactacaacgaattaaaaaatatgggagatacaataaaataccaggatgatattgagtttcttctgtccaattctaaaagtaatgacaatactacggtaccaatcaatgaatactttaaaaaacttttaaatttatccctaatgattattaatgacgaagaattttttcaatatgcgaaaagatatttcaaaaaggaaataattaagcttagttttgcgcaatttagatcggattttcctgaattaatcttattacagggttatttactacataaagttagtgaatcacaatccgatttcccgccaagctttgacaatttctctatcgaattaagtaaagatgatggtaaaatacggacaaaaaagaataagcatattaaaaaactctcacacctaaatttcgaagactttcttcggaagactcaattcaaaacgggactttattattcattatcactctgggaaatgcatggtaatttatcgttagatataatcaagagaatctccatccttgcttcaaataaggacttattcagtcggcacgttaagacttttattcctcttttagaaaaattaataaccgcttccgaattttgccacatgtatattgaacaacctgaaatgttcgattcactgataagcaacttgaataatcagtttaaggatatgcttgatgatgactcgttgattaaaatcctaatcttgttaacaaacatggaagtacataactatacgctatggaaagaggcagatatgatatttcaaagttcaatgaacacaattttggaaagcatacatccattgacagacgcgaaagttgataacatactcttgcatttagggctctgcctcaatatttgcagtagagaaaatagtcgtttaaaacttgacggcaaattatggtatgatatgaaaactatatttgttaaaatgatccgtgacggttctgacactgaaaataggttagtacagggcctgttttacttaaatttttcatttttaattaaacaacggaaagaaaatagtaatttagacccaggggagctcaatttgttactagtagagctggaagcatttaaatcggaaacatctcaatttaatgaaggtatttcaaataaaatcgaaatagcgttaaattacctaaaatcaatatacacgagtgaaagaattacaatataa

SEQ ID NO: 190879 - DNA, 390 bp, Saccharomyces pastorianus
atgtcttgttcgtttcatatatcaagtcctttaggctcttcttcttccttggagggcttttcttcattgaaggtggtggttgtagcctgtcaagctctttcgagggacctccttggtattgatcttgttctcttactccttttttggcgtccagataagcacccccattgggcttccgccacctgtgttctcagacagatttttggcacgaagttgttgtttttccaattccaaattaaacagtcttctttctacaacgttgatgttgactatgggagaagtcgtaatagaccttttgttctttcttgctggagcaacttcggtgcacaagctcttttcggcattattatgtaccccgagtggtatataggagcagcttctcctatttga

SEQ ID NO: 190880 - DNA, 5314 bp, Saccharomyces pastorianus
atggaatcccaacaattatctcaaaattcacccaatcttcatggtagcgcctatgcttcggttacttctaaggaagtcccatcaaatcaagatccgttagccgtttcagcttccaatttaccggaatttgatagagattccactaaggttaattctcaacaagagacaacacctgggacatcagctgttccagagaaccatcatcatgtctctcctcaacctgcttcagtaccacctccacagaatggacagtaccaacagcacggcatgatgaccccaaacaaagctatggcctctaactgggcacattaccaacaaccatctatgatgacgtgttcacattatcaaacgtcacctgcgtattatcaaccggacccacactatccgttgccacagtatatcccaccactgagtacttcctcacctgatccaatcgatttaaaaaatcaacactctgaaatacctcaagctaagacaaaggtgggaaataacgtcttaccaccacacactttaacatcagaagaaaacttttctacatgggttaaattttacatcagatttttgaagaactctaatctcggtgacatcattccaaatgaccagggtgaaatcaaaagacaaatgacttatgaagaacatgcgtatatatacaataccttccaagcatttgccccatttcatttattgccaacatgggtaaaacaaattttagaaattaattatgctgacatccttacagtcctttgtaaaagtgtgtccaaaatgcaaactaacaatcaagaattaaaggattggatagctcttgccaaccttgagtacgacggaagtacatctgctgatacatttgaaattacagtcagtacgatcattcagaggctaaaagaaaacaatatcaatgttagcgacagattggcctgtcaactaatacttaaaggtctatccggtgacttcaaatacctacgtaatcaatatcgtaccaaaacgaacatgaaactttcccaattattcgctgaaattcaattaatatatgacgaaaataaaatcatgaatctaaataaaccgtcccaatacaaacaacacagcgaatacaaaaatgtttctcgcacatctccaaacacgactaacacaaaggttacaactcgtaattatcagagaacaaatagttcaaaaccaagagcagcaaaagctcacaatattgctacatctagtaaattctcaagggtgaacaatgatcacattaatgaatcaaccgtttcatcacaatacttaagcgatgacaacgaacttagtcttaggccagcaacagaaagaatctaagccaacacacacaatagactcgaatgacgaactacctgatcaccttcttattgattcaggagcttcgcaaacgcttgtcagatcagcccattatttacaccatgcaacacccaattctgaaataaacatagtcgatgctcaaaaacaagacattcctataaatgccattggtaatcttcacttcaactttcagaacggcaccaaaacatcaataaaagcactacacacaccaaacatagcctatgatctattaagtttgagtgagctggctaatcaaaatattactgcctgctttaccagaaacactttagaaagatcggatggtacagtactagctcccatagtcaaacatggagacttttactggttatctaaaaaatacctaattccttcgcacatttcaaagctaacaataaacaacgtcaacaaaagcaaaagcgtaaataaatatccatatccgttaatacatcgaatgcttggacatgctaacttccgaagtattcagaagtctcttaagaagaatgcagttacatatttgaaggaatcggatattgaatggtctaacgctagcacatatcaatgtcctgactgtctaatcggcaaaagcacgaaacatagacatgtcaaaggatcacgactaaagtaccaagaatcatatgagccttttcagtacttgcataccgatatatttggtcctgtacatcacttaccgaaaagtgcaccttcttactttatatcgtttacagatgagaaaaccagattccaatgggtgtacccattacacgaccgtcgtgaagaatctatcctcaatgtttttacatcgatattagcatttattaagaaccaattcaatgctcgcgttctagttatccagatggatcgtggctccgagtacactaacaaaactcttcataagttctttacgaacagaggtattactgcatgctatacaaccacggcagattctagagcacacggtgtcgctgaacgattaaatcgtactttattaaacgattgtcgcacactgcttcattgcagtggtctaccaaatcatctatggttctcagcagtcgaattttctactataatcagaaattcattagtctcaccaaaaaacgataaatctgcaagacaacatgcaggtttagctggactggacattactactatactacctttcggtcaaccggttatagttaacaaccataatcccgactcgaaaatacatcctcgtggcattccaggttacgccttacatccgtcacgaaactcttatggctatattatctatcttccatcattaaaaaagacagtagatactaccaattacgttatattacaagacaagcaatccaaattggaccaattcaattatgatacactcacctttgatgatgatctcaatcgtttaacagcccataaccaatcttttattgaaaaaaatgaaacagagcagtcatatgatcaaaatacagaatctgatcatgactatcaatcggagattgaaataaactctgatcctctagtgaacgacttctcgtcccaatcaataaaccctttacaattagacaaggaaccagtccaaaaagtacgtgcaccaaaagaagttgatgccgacatatctgaatacaatattcttccatctactatacgatctcgtacaccccatatcattaataaagagagtaccgaaatgggtggtaccattgaatcagatactacttcacctagacactcgtctaccttcactgcacgaaaccaaaagcgacctggtagtcccaatgatatgattgatttgacctcacaggatagagttaattatggacttgaaaacatcaaaactacacgtttgggtggtacggaggaaccatatattcaacgaaatagtgatacaaatatcaaatacaggactacaaatagtacgccctcaatagatgaccgttcgtccaacagtgaatccactactcccatcatctccatagaaacaaaggctgcatgcgataatacaccctccattgatacggatccgccagaatatcgatcttctgaccatgcgactcctaatataatgcctgacaaatcctcaaaaaatgttacggctgattctattcttgacgacctcccacttcctgacttaactaataaatctcctacggacacttctgatgtttcaaaagatattccacacatacactctcgtcagactaattccagtttgggtggtatggatgattctaatgttctgactactaccaaaagtaagaaaagatcattagaagataatgaaactgaaattgaggtatcccgagacacatggaataataagaatatgagaagtctggaaccaccaagatcgaagaaacgtataaatctaattgctgcaataaaaggagtaaaatcaatcaaaccagttcgaacgaccttaagatatgatgaagcaattacatataatgaagacaacaaagaaaaagacagatatattgaagcttatcataaagaaattaaccaactattgagaatgaacacttgggatacaaacaaatattatgatagaaatgacatagatcctaagaaagtaataaactcaatgtttatatttaacaaaaaacgtgatggtacacacaaagctagatttgttgcaagaggcgacattcaacaccccgatacatatgattctgatatgcaatccaataccgtacatcactatgcactgatgacgtcattgtcaatcgcattagacaatgactattatatcacacagctggacatatcctctgcttacttatatgctgatatcaaagaagaattatacataagacctccaccacatttaggtttgaatgataagttactacgtttgagaaaatcactctatggtttgaaacaaagtggtgcaaactggtatgaaaccattaaatcatatttaataaattgttgcgacatgcaagaagttcgcggatggtcatgcgtatttaagaatagtcaagtaacaatttgcttattcgttgatgatatgatattattcagcaaagacttaaatgcaaataagaaaatcataacaacactcaagaaacaatacgatacaaagataataaatctgggtgaaggtgataacgaaattcagtacgacatacttggattagagatcaaatatcaaagaagcaagtacatgaaattaggtatggaaaaatccttgacagaaaaattacccaaactaaacgtacctttgaacccaaaaggaaagaaacttagagctccaggtcaaccaggtcattatatagaccaggatgaactagaaatagatgaagatgaatataaagagaaagtacatgaaatgcaaaagttgattggtctagcttcatatgttggatataaatttagatttgacttactatactacatcaacacacttgctcaacatatactattcccctctaggcaagttttagacatgacatatgagttaatacaattcatgtgggacactagagataaacaattaatatggcacaaaaacaaacctaccaagccagataataaactagtcgcaataagcgatgcttcatatggtaaccaaccatattacaagtcacaaattggtaacattttcctactcaacggaaaagtgattggaggaaagtcgacaaaggcttcgttaacatgcacttcaactacagaagcagaaatacacgcagtcagtgaagctataccgctattgaataacctcagtcaccttgtgcaagaacttaacaagaaaccaattattaaaggcttacttactgatagtagatcaacgatcagtataattaagtctacaaatgaagagaaatttagaaacagattttttggcacaaaggcaatgagacttagagatgaagtatcaggtaataatttatacgtatactacatcgagaccaagaagaacattgctgatgtgatgacaaaacctcttccgataaaaacatttaaactattaactaacaaatggattcattag

SEQ ID NO: 190881 - DNA, 3276 bp, Saccharomyces pastorianus
atgagcgagggaactgtcaaagaaaacaataatgaagaattcaatgcttatcacacattgactacagaagaagccgctgaatttataggcacaagtctgactgaaggtcttactcaagatgagtccctccgcagactgaaagcagtgggagagaacacattgggtgatgataccaaaattgactataaagcaatggtcctccatcaggtatgtaatgcaatgattatggtcttggtaatatccatggcgatctctttcgctgtgcgcgactggattactggtggcgttatttcttttgttatcgcggtcaatgtgctcattggcctagttcaagaatataaggctaccaagacaatgaactctttgaaaaacttgagctctcccaatgctcatgttattaggaacgggaaaagtgagactataaactcaaaagatgtggttccaggtgatatttgtctggtgaaggtcggtgatactattcctgctgatttgcgtttaattgaaactaagaattttgatactgatgaatcactactgaccggtgaatctttgcctgtctccaaagacgccaacttagtgtttggaaaagaagaagaaacctccgtgggtgatcgtttgaatttagcattttcttcatccgccgttgtcaagggaagagccaagggtattgtcatcaagacagctttgaatagtgaaattggtaaaattgcaaaatctctacaaggtgattcaggtctcatttcccgcgatcctagtaagtcgtggttacagaatacatggatatctacaaagaaagttactggtgcatttttaggtacaaatgtcggtacgcccctgcacaggaaactgtctaagttggcggtattgcttttctggattgccgtactttttgctatcatcgtcatggcctctcaaaagtttgacgtagataaaagggtagctatctatgccatttgtgtggccctatccatgattccctcttcattagtcgttgtcttgaccatcaccatgtctgttggggctgctgttatggtttctagaaacgttattgtaagaaaattagattctctggaagctttaggtgccgttaacgatatctgttctgacaagaccggtactcttacacagggtaaaatgttagcgaggcaaatttggatccctcgctttggtaccataactatctcgaattctgatgacccctttaatcccaatgagggcaacgtgagtttgattccaaggttttcaccttacgaatattctcataatgaggatggtgacgttggtattctccagaatttcaaggatcgcctatacgaaaaagatttaccagaagatattgacatggatctatttcaaaaatggctcgaaaccgccactttggctaacattgctactgttttcaaagatgacgcaactgactgttggaaagctcatggtgacccaacagaaattgcgattcaagtgtttgctactaagatggacttgcctcacaatgcccttaccggtgagaaatcgactaatcaaagtaatgagaatgaccaatcctctctttcacaacacaatgagaagcctggcagtgcacaattcgaacatattgctgaattcccattcgactcaactgtgaagcgaatgtcatctgtctactacaacaatcacaacgaaacatataatatttatggcaagggtgctttcgaaagcatcatcagttgttgcagttcttggtatggtaaggatggtgtaaaaatcacaccattgaccgattgtgatgtcgaaacgataaggaaaaatgtttacagtctatcaaatgagggtttaagagtcttgggttttgcctccaaatctttcactaaagatcaagtgaatgacgatcaattgaaaaacattacttcaaacagggccaccgcagaaagtgatttagttttcctagggttgattggtatttacgatccacccagaaatgagactgccggtgcagtcaagaagtttcaccaagctggtattaacgttcatatgttaactggggactttgtgggtacagcaaaggctatcgctcaggaggttggcatcttacccaccaatttgtaccattactcccaagagattgttgacagtatggtcatgaccggatctcagtttgacggactaagtgaggaggaagtggacgatttgcccgtcttacctttagttattgcacgttgctctccgcagactaaggtgagaatgatcgaagctttacaccgtaggaagaagttctgcgcaatgacaggtgacggtgttaacgattctccatctctaaaaatggccaatgttggtattgcaatgggtattaatggttcagatgtttccaaagaagcgtctgatattgttctaagcgatgacaattttgcttctattttgaatgctgtcgaagaaggtcgtaggatgacggataacattcagaagtttgtcctacaattattggcagaaaatgttgctcaggctttgtatttgatcattggtttagtattcagagatgagaacggaaaatcagtatttcccttatcaccagtggaagtattgtggattattgtcgtcacctcttgttttcctgctatggggctaggtctagaaaaggctgctccagatttgatggatagacctcctcatgattcagaggttggtattttcacgtgggaggttattatagatacatttgcatatgggattataatgacagggtcctgtatggcttcatttactggatcactgtatggaataaatagtggtagattggggcacgattgtgatggcacctataacagcagttgtcgtgatgtttatagatcacgttctgcggctttcgcaaccatgacgtggtgcgctttgattctggcttgggaagtggttgacatgagaagatcctttttcagaatgcatccagacactgacagcccagtcaaggaatttttcagaagtatttggggaaaccagtttttgttctggtcaatcatttttggatttgtgtcagccttccccgtcgtctatattccggttattaatgataaagtgtttttgcataaaccaattggtgctgaatggggtctcgccattgcattcacaattgcattctggataggtgctgaactttacaagtgtggaaagaggcgctatttcaaaactcagagagcgcacaacccggagaatgatttggagagtaacaataagcgcgatccattcgaagcgtatagtacttctactacaatccatacagaagttaatattggtattaaacaatga

SEQ ID NO: 190882 - DNA, 333 bp, Saccharomyces pastorianus
atgctttcgttttgtccttcgtgtaacaatatgctactgataacgagtggcgatagtggtgtatatacattagcatgccgttcatgtccatatgagtttcctatagagggtatagaaatctatgataggaagaaacttccaagaaaggaagttgatgatgttcttggtggtggttgggacaatgtggatcaaaccaaaacccaatgtcccaattatgatacttgtggtggtgagagtgcttactttttccaactacaaattaggtcagctgatgagccgatgactaccttttataagtgtgtaaactgtggtcatagatggaaggaaaattaa

SEQ ID NO: 190883 - DNA, 5269 bp, Saccharomyces pastorianus
atggaatcccaacaattatctaattacccacatatatctcatggtagcgcctgtgcttcggttacttctaaggaagtccacacaaatcaagatccgttagacgtttcagcttccaaaattcaagaatatgataaggcttccactaaggctaactctcaacagacaacaacacctgcttcatcagctgttccagagaacccccatcatgcctctcctcaacctgcttcagtaccacctccacagaatgggccgtacccacagcagtgcatgatgacccaaaaccaagccaatccatctggttggtcattttacggacacccatctatgattccgtatacaccttatcaaatgtcgcctatgtactttccacctgggccacaatcacagtttccgcagtatccatcatcagttggaacgcctctgagcactccatcacctgagtcaggtaatacatttactgattcatcctcagcggactctgatatgacatccactaaaaaatatgtcagaccaccaccaatgttaacctcacctaatgactttccaaattgggttaaaacatacatcaaatttttacaaaactcgaatctcggtggtattattccgacagtaaacggaaaacccgtacgtcagatcactgatgatgaactcaccttcttgtataacacttttcaaatatttgctccctctcaattcctacctacctgggtcaaagacatcctatccgttgattatacggatatcatgaaaattctttccaaaagtattgaaaaaatgcaatctgatacccaagaggcaaacgacattgtgaccctggcaaatttgcaatataatggcagtacacctgcagatgcatttgaaacaaaagtcacaaacattatcgacagactgaacaataatggcattcatatcaataacaaggtcgcatgccaattaattatgagaggtctatctggcgaatataaatttttacgctacacacgtcatcgacatctaaatatgacagtcgctgaactgttcttagatatccatgctatttatgaagaacaacagggatcgagaaacagcaaacctaattacaggagaaatccgagtgatgagaagaatgattctcgcagctatacgaatacaaccaaacccaaagttatagctcggaatcctcaaaaaacaaataattcgaaatcgaaaacagccagggctcacaatgtatccacatctaataactctcccagcacggacaacgattccatcagtaaatcaactactgaaccgattcaattgaacaataagcacgaccttcatcttaggccaggaacttactgaatctacggtaaatcacactaatcattctgatgatgaactccctggacacctccttctcgattcaggagcatcacgaacccttataagatctgctcaccacatacactcagcatcatctaatcctggcataaacgtagttgatgctcaaaaaagaaatataccaattaacgctattggtgacctacaatttcacttccaggacaacaccaaaacatcaataaaggtattgcacactcctaacatagcctatgacttactcagtttgaatgaattggctgcagtagatatcacagcatgctttaccaaaaacgtcttagaacgatctgacggcactgtacttgcacctatcgtaaaatatggagacttttactgggtatctaaaaagtacttgcttccatcaaatatctccgtacccaccatcaataatgtccatacaagtgaaagtacacgcaaatatccttatcctttcattcatcgaatgcttgcgcatgccaatgcacagacaattcgatactcacttaaaaataacaccatcacgtattttaacgaatcagatgtcgactggtctagtgctattgactatcaatgtcctgattgtttaatcggcaaaagcaccaaacacagacatatcaaaggttcacgactaaaataccaaaattcatacgaaccctttcaatacctacatactgacatatttggtccagttcacaacctaccaaatagtgcaccatcctatttcatctcatttactgatgagacaacaaaattccgttgggtttatccattacacgaccgtcgcgaggactctatcctcgatgtttttactacgatactagcttttattaaaaaccagtttcaggccagtgtcttggttatacaaatggaccgtggttctgagtatactaacagaactctccataaattccttgaaaaaaatggtataactccatgctatacaaccacagcggattcccgagcacatggagtcgctgaacggctaaaccgtaccttattagatgactgccgtactcaactgcaatgtagtggtttaccgaaccatttatggttctctgcaatcgaattttctactattgtgagaaattcactagcttcacctaaaagcaaaaaatctgcaagacaacatgctggcttggcaggacttgatatcagtactttgttacctttcggtcaacctgttatcgtcaatgatcacaaccctaactccaaaatacatcctcgtggcatcccaggctacgctctacatccgtctcgaaactcttatggatatatcatctatcttccatccttaaagaagacagtagatacaactaactatgttattcttcagggcaaggaatccagattagatcaattcaattacgacgcactcactttcgatgaagacttaaaccgtttaactgcttcatatcattcgttcattgcgtcaaatgagatccaagaatccaatgatcttaacatagaatctgaccatgacttccaatccgacattgaactacatcctgagcaaccgagaaatgtcctttcaaaagctgtgagtccaaccgattccacacctccgtcaactcatactgaagattcgaaacgtgtttctaaaaccaatattcgcgcacccagagaagttgaccccaacatatctgaatctaatattcttccatcaaagaagagatctagcaccccccaaatttccaatatcgagagtaccggttcgggtggtatgcataaattaaatgttcctttacttgctcccatgtcccaatctaacacacatgagtcgtcgcacgccagtaaatctaaagatttcagacactcagactcgtacagtgaaaatgagactaatcatacaaacgtaccaatatccagtacgggtggtaccaacaacaaaactgttccgcagataagtgaccaagagactgagaaaaggattatacaccgttcaccttcaatcgatgcttctccaccggaaaataattcatcgcacaatattgttcctatcaaaacgccaactactgtttctgaacagaataccgaggaatctatcatcgctgatctcccactccctgatctacctccagaatctcctaccgaattccctgacccatttaaagaactcccaccgataaattctcatcaaactaattccagtttgggtggtattggtgactctaatgcctatactactatcaacagtaagaaaagatcattagaagataatgaaactgaaattaaggtatcacgagacacatggaatactaagaatatgcgtagtttagaacctccgagatcgaagaaacgaattcacctgattgcagctgtaaaagcagtaaaatcaatcaaaccaatacggacaaccttaagatacgatgaggcaatcacctataataaagatattaaagaaaaggaaaaatatatcgaagcataccacaaagaagtcaaccaactattgaaaatgaatacttgggacactgacaaatattatgacagaaaagaaatagaccctaaaagagtaataaattcaatgtttatcttcaacaggaaacgtgacggtactcataaagctagatttgttgcaagaggtgatattcagcatcctgacacttacgactcaggcatgcaatccaataccgtacatcactatgcattaatgacatccctgtcacttgcattagacaataactactatattacacaattagacatatcttcggcatatttgtatgcagacatcaaagaagaattatacataagacctccaccacatttaggaatgaatgataagttgatacgtttgaagaaatcactttatggattgaaacaaagtggagcgaactggtacgaaactatcaaatcatacctgataaaacagtgtggtatggaagaagttcgtggatggtcatgcgtatttaagaatagtcaagtaacaatttgcttattcgttgatgatatgatattgttcagcaaagacttaaatgcaaataagaaaatcataacaacactcaagaaacaatacgatacaaagataataaatctgggtgaaggtgataacgaaattcagtacgacatacttggattagagatcaaatatcaaagaagcaagtacatgaaattaggtatggaaaaatccttgacagaaaaattacccaaactaaacgtacctttgaacccaaaaggaaagaaacttagagctccaggtcaaccaggtcattatatagaccaggatgaactagaaatagatgaagatgaatacaaagagaaagtgcatgaaatgcaaaagttgattggtctagcttcatatgttggatataaatttagatttgacttactatactacatcaacacacttgctcaacatatactattcccctctaggcaagttttagacatgacatatgagttaatacaattcatgtgggacactagagataaacaattaatatggcacaaaaacaaacctaccaagccagataataaactagtcgcaataagcgatgcttcatatggtaaccaaccatattacaagtcacaaattggtaacattttcctactcaacggaaaagtgattggaggaaagtcgacaaaggcttcgttaacatgcacttcaactacagaagcagaaatacacgcagtcagtgaagctattccgctattgaataacctcagtcaccttgtgcaagaacttaacaagaaaccaattattaaaggctcacttactgatagtagatcaacgatcagtataattaagtctacaaatgaagagaaatttagaaacagattttttggcacaaaggcaatgagacttagagatgaagtatcaggtaataatttatacgtatactacatcgagaccaagaagaacattgctgatgtgatgacaaaacctcttccgataaaaacatttaaactattaacaaacaaatggattcattag

SEQ ID NO: 190884 - DNA, 2559 bp, Saccharomyces pastorianus
atgagttctgtcaaccaaatatatgacctatttcccaataagcataatatccaatttacagattctcattcacaggagcatgatacttcgtccagccttgctaagaatgatacagacggaactataagtataccaggtagtatagacactggcattttaaagagcattattgaggagcaaggttggaatgacgctgagttatatagaagttcaatacaaaatcaaagattttttttaacggataaatacactaaaaagaagcatttgactatggaggacatgcttagcccagaagaagaacaaatatatcaggaacctattcaagatttccaaacatataacaaacgtgttcaaagggaatatgagctcagggaaaggatggaagaattcttccgtcaaaacaccaaaaatgatttacatattttaaacgaggattcattaaatcagcaatattccccgttaggacctgcagattatgttctgcccctcgatagatactccagaatgaaacacattgcctcaaactttttcagaaaaaaacttggtattcctagaaaactgaaaagaagaagccattataatcccaacgcagagggccacaccaaagggaattcttctatattgagttccactactgatgtaattgataacgccagctacaggaatattgcaatagatgaaaatgttgacataacacataaagaacacgccattgacgaaataaacgagcagggtgcatcaggtagtgaatctgttgtggaaggtggatcgttattgcatgacattgaaaaggttttcaataggtccagggcaactaggaaataccatatccaacggaaattaaaagtgcgccatattcaaatgctttctatcggggcttgctttagtgtcggattatttttaacctcagggaaagccttttctattgccgggccatttggtacactacttgggtttggactcacaggtagcatcattttagccacaatgctgtcatttacagagttatccacccttattcctgtgtcttctgggttctcaggactggcttctagatttgtagaggatgctttcggatttgcattgggctggacgtattggatttcctgtatgcttgctcttcctgcccaagtttcctcaagtacattctatctcagctattataataatgtcaatatatcaaagggagtaacagcagggtttatcacgctgttttctgcatttagcattgtagtaaatttactggatgtcagcataatgggtgaaattgtatatgttgctggaataagcaaagtgataattgcaattttgatggttttcacgatgatcatcctaaatgccggacatggaaatgacattcacgaaggagtcggttttagatattgggatagctctaaatctgtccgaaatttgacctacgggctatatcgtccaacatttgacctggctgatgctggcgaaggaagcaaaaaaggaatttcaggcccaaaaggccgatttttagctacggcatcagtaatgctaatttcaacatttgcgtttagcggtgttgagatgacttttttagctagtggggaagctataaatccaaggaaaacaattccttctgctacaaaaaggacattttccattgtactgatatcttacgtttttttgattttttcggtaggcatcaacatatacagtggcgatccaagactactatcatattttcctggtatttccgaaaagaggtatgaagccattataaaaggcacaggaatggactggagacttaggactaattgtcgcggcggtattgattataggcagatttcagtaggaacaggttattctagtccttgggttgttgcattgcagaactttgggctatgtactttcgcatctgcttttaacgcaatactgatatttttcactgctacagcagggatatcctcgttatttagttgttcaagaacactatacgccatgtctgtacaacggaaggcaccgccagttttcgaaatttgcagcaagagaggtgttccttatgtttcagtgatattctcctctttattttcagtcattgcttatattgcagttgaccaaaccgcgattgaaaacttcgacgtcttggccaatgtttctagtgctagtacgtctattatatggatgggattgaatctttcctttttgcgattctattacgccctaaaacaaaggaaggatattatatcaagaaatgattcatcatacccatataaatcgccattccaaccatatctagcgatttatggtctagttggatgttcattatttgttatatttatgggatatcctaactttatacatcatttctggagtactaaagcttttttttcagcatatggtggcctgatgtttttctttatcagttacacagcttataaggttctcggaacgtcaaagattcaaagactagatcagttagatatggacagtgggaggagggaaatggacagaactgactggaccgaacatagccaatatttgggaacatatagggaaagagcgaagaagttggttacctggctgatttag

SEQ ID NO: 190885 - DNA, 5269 bp, Saccharomyces pastorianus
atggaatcccaacaattatctaattacccacatatatctcatggtagcgcctgtgcttcggttacttctaaggaagtccacacaaatcaagatccgttagacgtttcagcttccaaaattcaagaatatgataaggcttccactaaggctaactctcaacagacaacaacacctgcttcatcagctgttccagagaacccccatcatgcctctcctcaacctgcttcagtaccacctccacagaatgggccgtacccacagcagtgcatgatgacccaaaaccaagccaatccatctggttggtcattttacggacacccatctatgattccgtatacaccttatcaaatgtcgcctatgtactttccacctgggccacaatcacagtttccgcagtatccatcatcagttggaacgcctctgagcactccatcacctgagtcaggtaatacatttactgattcatcctcagcggactctgatatgacatccactaaaaaatatgtcagaccaccaccaatgttaacctcacctaatgactttccaaattgggttaaaacatacatcaaatttttacaaaactcgaatctcggtggtattattccgacagtaaacggaaaacccgtacgtcagatcactgatgatgaactcaccttcttgtataacacttttcaaatatttgctccctctcaattcctacctacctgggtcaaagacatcctatccgttgattatacggatatcatgaaaattctttccaaaagtattgaaaaaatgcaatctgatacccaagaggcaaacgacattgtgaccctggcaaatttgcaatataatggcagtacacctgcagatgcatttgaaacaaaagtcacaaacattatcgacagactgaacaataatggcattcatatcaataacaaggtcgcatgccaattaattatgagaggtctatctggcgaatataaatttttacgctacacacgtcatcgacatctaaatatgacagtcgctgaactgttcttagatatccatgctatttatgaagaacaacagggatcgagaaacagcaaacctaattacaggagaaatcggagtgatgagaagaatgattctcgcagctatacgaatacaaccaaacccaaagttatagctcggaatcctcaaaaaacaaataattcgaaatcgaaaacagccagggctcacaatgtatccacatctattaactctcccagcacggacaacgattccatcagtaaatcaactactgaaccgattcaattgaacaataagcacgaccttcatcttaggccagaaacttactgaatctacagtaaatcatactaatcattctgatgatgaactccctggacacctccttctcgattcaggagcatcacgaacccttataagatctgctcatcacatacactcagcatcatctaatcctgacataaacgtagttgatgctcaaaaaagaaatataccaattaacgctattggtgacctacaatttcacttccaggacaacaccaaaacatcaataaaggtattgcacactcctaacatagcctatgacttactcagtttgaatgaattggctgcagtagatatcacagcatgctttaccaaaaacgtcttagaacgatctgacggcactgtacttgcacctatcgtaaaatatggagacttttactgggtatctaaaaagtacttgcttccatcaaatatctccgtacccaccatcaataatgtccatacaagtgaaagtacacgcaaatatccttatcctttcattcatcgaatgcttgcgcatgccaatgcacagacaattcgatactcacttaaaaataacaccatcacgtattttaacgaatcagatgtcgactggtctagtgctattgactatcaatgtcctgattgtttaatcggcaaaagcaccaaacacagacatatcaaaggttcacgactaaaataccaaaattcatacgaaccctttcaatacctacatactgacatatttggtccagttcacaacctaccaaatagtgcaccatcctatttcatctcatttactgatgagacaacaaaattccgttgggtttatccattacacgaccgtcgcgaggactctatcctcgatgtttttactacgatactagcttttattaaaaaccagtttcaggccagtgtcttggttatacaaatggaccgtggttctgagtatactaacagaactctccataaattccttgaaaaaaatggtataactccatgctatacaaccacagcggattcccgagcacatggagtcgctgaacggctaaaccgtaccttattagatgactgccgtactcaactgcaatgtagtggtttaccgaaccatttatggttctctgcaatcgaattttctactattgtgagaaattcactagcttcacctaaaagcaaaaaatctgcaagacaacatgctggcttggcaggacttgatatcagtactttgttacctttcggtcaacctgttatcgtcaatgatcacaaccctaactccaaaatacatcctcgtggcatcccaggctacgctctacatccgtctcgaaactcttatggatatatcatctatcttccatccttaaagaagacagtagatacaactaactatgttattcttcagggcaaggactccagattagatcaattcaattacgacgcactcactttcgatgaagacttaaaccgtttaactgcttcatatcaatcgttcattgcgtcaaatgagatccaacaatccaatgatcttaacatagaatcagaccatgactttcaatctgatattgaactatatcctgagcaaccgagaaatgtcctttcaaaagctgtgagtccaaccgattccacacccccgtcaactcatactgaagattcgaaacgtgtttctaaaaccaatattcgcgcacccagagaagttgaccccaacatatctgaatctaatattcttccatctaagaagagatctagcaccccccaaatttccgatatcgagagtaccgattcgggtggtatgcatagattagatgttcctttacttgctcccatgtcccaatctaacacacatgagtcgtcgtacgccagtaaatctaaagatttcagacactcagactcgtacagtgaaaatgagactaatcatacaaacgtaccaatatccagtacgggtggtaccaacaacaaaactgttccgcagataagtgaccaagagactgagaaaaggattatacaccgttcaccttcaatcgatgcttctccaccggaaaataattcatcgcacaatattgttcctatcaaaacgccaactactgtttctgaacagaataccgaggaatctatcatcgctgatctcccactccctgatctacctccagaatctcctaccgaattccctgacccatttaaagaactcccaccgataaattctcatcaaactaattccagtttgggtggtattggtgactctaatgcctatactactatcaacagtaagaaaagatcattagaagataatgaaactgaaattaaggtatcacgagacacatggaatactaagaatatgcgtagtttagaacctccgagatcgaagaaacgaattcacctgattgcagctgtaaaagcagtaaaatcaatcaaaccaatacggacaactttaagatacgatgaggcaatcacctataataaagatattaaagaaaaggaaaaatatatcgaagcataccacaaagaagtcaaccaactattgaaaatgaatacttgggacactgacaaatattatgacagaaaagaaatagaccctaaaagagtaataaactcaatgtttatcttcaacaagaaacgtgacggaactcataaagctagatttgttgcaagaggtgacattcagcatcctgatacgtacgatacaggtatgcaatccaacactgtacatcattatgcgttgatgacatccctgtcacttgcattagacaataactactatattacacaattagacatatcttcggcatatttgtatgcagacatcaaagaagaattatacataagacctccaccacatttaggaatgaatgataagttgatacgtttgaagaaatcactttatggattgaaacaaagtggagcgaactggtacgaaactatcaaatcatacctgataaaacagtgtggtatggaagaagttcgtggatggtcatgcgtatttaagaatagtcaagtaacaatttgcttattcgttgatgatatgatattgttcagcaaagacttaaatgcaaataagaaaatcataacaacactcaagaaacaatacgatacaaagataataaatctgggtgaaagtgataacgaaattcagtacgacatacttggcttagaaatcaaatatcaaagaggtaaatacatgaaattaggtatggaaaaatccttgacagaaaaattacccaaactaaacgtacctttgaacccaaaaggaaagaaacttagagctccaggtcaaccaggtcattatatagaccaggatgaactagaaatagatgaagatgaatacaaagagaaagtgcatgaaatgcaaaagttgattggtctagcttcatatgttggatataaatttagatttgacttactatactacatcaacacacttgctcaacatatactattcccctctaggcaagttttagacatgacatatgagttaatacaattcatgtgggacactagagataaacaattaatatggcacaaaaacaaacctaccaagccagataataaactagtcgcaataagtgatgcttcatatggtaaccaaccatattacaagtcacaaattggtaacattttcctactcaacggaaaagtgattggaggaaagtcgacaaaggcttcgttaacatgcacttcaactacagaagcagaaatacacgcagtcagtgaagctattccgctattgaataacctcagtcaccttgtgcaagaacttaacaagaaaccaattattaaaggcttacttactgatagtagatcaacgatcagtataattaagtctacaaatgaagagaaatttagaaacagattttttggcacaaaggcaatgagacttagagatgaagtatcaggtaataatttatacgtatactacatcgagaccaagaagaacattgctgatgtgatgacaaaacctcttccgataaaaacatttaaactattaacaaacaaatggattcattag

SEQ ID NO: 190886 - DNA, 5314 bp, Saccharomyces pastorianus
atggaatcccaacaattacatcaaaatccacattcccaacatggtagcgcctatgcttcggttacttctaaggaagtcccatcaaatcaagatccgttagccgtttcagcttccaatttaccggaatttgatagagattccactaaggttaattctcaagaagagacaacacctgggacatcagctgttccagagaaccatcatcatgtctctcctcaacctgcttcagtaccacctccacagaatggacagtaccaacagcacggcatgatgaccccaaacaaagctatggcctctaactgggcacattaccaacaaccatctatgatgacgtgttcacattatcaaacgtcacctgcgtattatcaaccggacccacactatccgctgccacagtatatcccaccgctgagtacttcctcacctgatccaatcgattcacaggatcaacactctgaagtacctcaagctaagacaaaggtgagaaataatgtcttaccaccacacactttaacatcagaagaaaacttttctacatgggttaaattttacatcagatttttgaagaactctaatctcggtgacattattccaaatgaccagggtgaaatcaaaagacaaatgacttatgaagaacatgcgtatatatacaataccttccaagcatttgccccatttcatttattgccaacatgggtaaaacaaattttagaaattaattattctgacatccttacagtcctttgtaaaagtgtgtccaaaatgcaaactaacaatcaagaattaaaagattggatagctcttgccaaccttgagtacaacggaagtacatctgctgatacatttgaaattacagtcagcacgatcattcaaaggctaaaagaaaacaatatcaatgttagcgacagattggcctgtcaactaatacttaaaggtctatccggtgatttcaaatacctacgtaatcaatatcgtaccaaaacgaacatgaaactttcccaattattcgctgaaattcaattaatatatgacgaaaataaaatcatgaatctaaataaaccgtcccaatacaaacaacacagcgaatacaaaaatgtttctcgcacatctccaaacacgactaacacgaaggttacaactcgtaattatcatagaacaaatagttcaaaaccaagagcagcaaaagctcacaatattgctacatccagtaaattctcaagggtgaacagtgatcacattaatgaatcaaccgtttcatcacaatacttaagcgatgacaacgaacttagtcttaggccagcaacagaaagaatctaagccaacacgcacaatagactcgaatgacgaactacctgatcaccttcttattgattcaggagcttcgcaaacgcttgtcagatcagcccattatttacaccatgcaacacccaattctgaaataaacatagtcgatgctcaaaaacaagacattcctataaatgccattggtaatcttcacttcaactttcagaacggcaccaaaacatcaataaaagcactacacacaccaaacatagcctatgatctattaagtttgagtgagctggctaaccaaaatattactgcctgctttaccagaaacactttagaaagatcggatggtacagtactagctcccatagtcaaacatggagacttttactggttatctaaaaaatacctaattccttcgcacatttcaaagctaacaataaacaacgtcaacaaaagcaaaagcgtaaataaatatccatatccgttaatacatcgaatgcttggacatgctaacttccgaagtattcagaagtctcttaagaagaatgcagttacatatttgaaagaatcggatattgaatggtctaacgctagcacatatcaatgtcctgactgtctaatcggcaaaagcacgaaacataggcatgtcaaaggatcacgactaaagtaccaagaatcatatgagccttttcagtacttgcataccgatatatttggtcctgtacatcacttaccgaaaagtgcaccttcttactttatatcgtttacagatgagaaaaccagattccaatgggtgtacccattacacgaccgtcgtgaagaatctatcctcaatgtttttacatcgatattagcatttattaagaaccaattcaatgctcgcgttctagttatccagatggatcgtggctccgagtacactaacaaaactcttcataagttctttacgaacagaggtattactgcatgctatacaaccacggcagattctagagcacacggtgtcgctgaacgattaaatcgtactttattaaacgattgtcgcacactgcttcattgcagtggtctaccaaatcatctatggttctcagcagtcgaattttctactataatcagaaattcattagtctcaccaaaaaacgataaatctgccagacaacatgcaggtttagctggactggacattactactatactacctttcggtcaaccggttatagttaacaaccataatcccgactcgaaaatacatcctcgtggcattccaggttacgccttacatccgtcacgaaactcttatggctatattatctatcttccatccttaaaaaagacagtagatactaccaattacgttatattacaaaacaatcaaacgaaattggaccagttcgactacgatacactcacttttgatgatgatctcaatcgtttaacagcccataaccaatcttttattgaacaaaatgaaacggagcagtcatatgatcaaaatacagaatctgatcatgactatcaatcggagattgaaataaactctgatcctctagtgaacgatttctcgtcccaatcattgaaccctttacaattagacaaggaaccagtccaaaaggtacgtgcaccaaaagaagttgatgccgacatatctgaatacaatattcttccatctactatacgatctcgtacaccccatatcattaataaagagagtaccgaaatgggtggtaccattgaatcagatactacttcacctagacactcgtctaccttcactgcacgaaaccaaaagcgacctggtagtcccaatgatatgattgatttgacctcacaggatagagttaattatggacttgaaaacatcaaaactacacgtttgggtggtacggaggaaccatatattcaacgaaatagtgatacaaatatcaaatacaggactacaaatagtacgccctcaatagatgaccgttcgtccaacagtgaatccactactcccatcatctccatagaaacaaaggctgtatgtgataatacaccctccattgatacggatccgccagaatatcgatcttctgaccatgcgactcctaatataatgcctgacaaatcctcaaaaaatgttacggctgattctattcttgacgacctcccacttcctgacttaacccataaatctcctacggacacttctgatgttgcaaaagatattccacacatacactctcgtcagactaattccagtttgggtggtatggatgattctaatgttctgactactaccaaaagtaagaaaagatcattagaagataatgaaactgaaattgaggtatcccgagacacatggaataataagaatatgagaagtctggaaccaccaagatcgaagaaacgcataaatttaattgcagcaataaaaggagtgaaatcgatcaaaccagttcgaacgaccttaagatatgatgaagcaattacatataataaagacaacaaagaaaaagacagatatgttgaagcttatcataaagaaattagccaactattgaaaatgaacacttgggatacaaacaaatattatgatagaaatgacatagatcctaaaaaagtaataaactcaatgtttatatttaacaagaaacgtgatggtacacacaaagctagatttgttgcaagaggcgacattcaacaccccgatacatatgattctgatatgcaatccaataccgtacatcactatgcactgatgacgtcattgtcaatcgcattagacaatgactattatatcacacagctggacatatcctctgcttacttatatgctgatatcaaagaagaattatacataagacctccaccacatttaggtttgaatgataagttactacgtttgagaaaatcactctatggtttgaaacaaagtggtgcaaactggtatgaaaccattaaatcatatttaataaattgttgcgacatgcaagaagttcgcggatggtcatgcgtatttaagaatagtcaagtaacaatttgcttattcgttgacgacatgattttatttagcaaagacttaaatgcaaataagaaaatcataacaacactcaagaaacaatacgatacaaagataataaatctgggtgaaggtgataacgaaattcagtacgacatacttggattagagatcaaatatcaaagaagcaagtacatgaaattaggtatggaaaaatccttgacagaaaaattacccaaactaaacgtacctttgaacccaaaaggaaagaaacttagagctccaggtcaaccaggtcattatatagaccaggatgaactagaaatagatgaagatgaatacaaagagaaagtgcatgaaatgcaaaagttgattggtctagcttcatatgttggatataaatttagatttgacttactatactacatcaacacacttgctcaacatatactattcccctctaggcaagttttagacatgacatatgagttaatacaattcatgtgggacactagagataaacaattaatatggcacaaaaacaaacctaccaagccagataataaactagtcgcaataagcgatgcttcatatggtaaccaaccatattacaagtcacaaattggtaacattttcctactcaacggaaaagtgattggaggaaagtcgacaaaggcttcgttaacatgcacttcaactacagaagcagaaatacacgcagtcagtgaagctataccgctattgaataacctcagtcaccttgtgcaagaacttaacaagaaaccaattattaaaggcttacttactgatagtagatcaacgatcagtataattaagtctacaaatgaagagaaatttagaaacagattttttggcacaaaggcaatgagacttagagatgaagtatcaggtaataatttatacgtatactacatcgagaccaagaagaacattgctgatgtgatgacaaaacctcttccgataaaaacatttaaactattaactaacaaatggattcattag

SEQ ID NO: 190887 - DNA, 384 bp, Saccharomyces pastorianus
atgaaaacaccgccaaaccaagaaaagaacaacgaaaaaatatcacttttatttagttcacaacggctaactatcgacgttcacccttcctcagtctatcacatcgtccttagctcgaacaacgccgataggcatcaagttacattgagctttactgcacgttcccgcatgatgccattgactagggcccgcctttcggcaatcattctagcatgttccgcatgttccttgacgccatggtcatccttgccgtcgcctccggcgtttcccttccccctcagctgccagggcgccgttcacacaacgcaagcacacccggcgccaaaaaaccggggaaagaccacggcgctatggtttcggagtttcccgccaatggcgttataa

SEQ ID NO: 190888 - DNA, 1404 bp, Saccharomyces pastorianus
atgttgcttagtgcgcctgttaacagtaccgtgcggcgcaagccacacagtccaaataaaaaaaagccaaaagagacaggtacagctgcttccttttcgtcgtcctcttcaactgtcgtcctttcatccaataatgatggcagctttgatgctctttgggacccctctataagtaaggcctcggattttgagagtagctatattagtgctaaacgattaaaaccagaaagtagtaatagacagaaaaaaaaaaattcttataaatattctagggaggaaaacaccaacgaggtagaggaaaagacgtctcttggcagcagctctaagacagaagcagataatatatttaatgaccagctcacgtcagctggcaatactacatatgtcagtaataagcgcgatgtaaacttcggggcgaattcggctgtagtactgctcggtttgccaacaagtaaaagtgaatctcaccgacaataccacagtccttcggcttcaacaactaatgaagatgaagaggacattggtgttgatattttagtagacaaccacatcgatagttgcgaaacagtatcgataaataataatagaggtattacacaccaatatccagaaacggaatcagatgtcgactttgatgaggccgtgatattgacaccaatggatggtacggataagggagtgaaaaatccaagaccactcgaaaaaaaatatagtagcagttgttttgaggaccgtacgccccttaacttggatgatggtcatttcagtgaatgcaatcatttttctacattagatgtgtctagcttttttcatctcaacgagcatgtgcataaaatcgacgaagtagagctcgatggacctgatcgcacctttagtctagacaacgtcgctattaatacaaggaaaaaggatattgattgcctctataatagttcaagagaagacttatccaacctcacatgttcttcggaaggcccaaggaatgatagttatgatagtgattacaacattgatgaggtcacttatagagatgatgaatcaacagatgaagacgagagcttaccaaccccagatcgaaaaaggaagaaaattggccataaagcttgcgaaatattggattctaaaagaattggaataaaagtaccaaagttatacgtttggtctttaagtgataaaccgtttagtgttatcgatgggttgtgcacaaaatcgctgtacccattgagtgatgacataaatactcctgaaagtttgagctcatgctcaagctcagtaagttcacgggaaaatcaaaaaggagatgcaacatttgataatgatgctatgatagccgaccttctaaacataggcggactcgaagtagagaaggcatccaatggccatattgagctcataggcgagtga

SEQ ID NO: 190889 - DNA, 399 bp, Saccharomyces pastorianus
atgtccggtggtaaaggtggtaaagctggttcagctgctaaagcttctcaatctagatctgctaaggctggtttgacattcccagtcggtagagtgcacagattgctaagaagaggtaactacgcccaaagaattggttctggtgctccagtctacttgactgctgtcttggaatatttggccgctgaaattttagaattagctggtaatgctgctagggataacaagaagaccagaattattccaagacatttgcaattggctatcagaaatgatgacgaattgaacaagctattgggtaacgttaccattgcccaaggtggtgttttgccaaacatccatcaaaacttgttgccaaagaagtctgccaaggctaccaaggcttctcaagaattataa

SEQ ID NO: 190890 - DNA, 4816 bp, Saccharomyces pastorianus
atggaatcccaacaattatctcaacattcacccatttctcatggtagcgcctgtgcttcggttacttctaaggaagtccacacaaatcaagatccgttagacgtttcagcttccaaaacagaagaatgtgagaaggcttccactaaggctaactctcaacagacaacaacacctgcttcatcagctgttccagagaacccccatcatgcctctcctcaacctgcttcagtaccacctccacagaatgggccgtacccacagcagtgcatgatgacccaaaaccaagccaatccatctggttggtcattttacggacacccatctatgattccgtatacaccttatcaaatgtcgcctatgtactttccacctgggccacaatcacagtttccgcagtatccatcatcagttggaacgcctctgagcactccatcacctgagtcaggtaatacatttactgattcatcctcagcggactctgatatgacatccactaaaaaatatgtcagaccaccaccaatgttaacctcacctaatgactttccaaattgggttaaaacatacatcaaatttttacaaaactcgaatctcggtggtattattccgacagtaaacggaaaacccgtacgtcagatcactgatgatgaactcaccttcttgtataacacttttcaaatatttgctccctctcaattcctacctacctgggtcaaagacatcctatccgttgattatacggatatcatgaaaattctttccaaaagtattgaaaaaatgcaatctgatacccaagaggcaaacgacattgtgaccctggcaaatttgcaatataatggcagtacacctgcagatgcatttgaaacaaaagtcacaaacattatcgacagactgaacaataatggcattcatatcaataacaaggtcgcatgccaattaattatgagaggtctatctggcgaatataaatttttacgctacacacgtcatcgacatctaaatatgacagtcgctgaactgttcttagatatccatgctatttatgaagaacaacagggatcgagaaacagtaaacctaattacaggagaaatccgagtgatgagaagaatgattctcgcagctatacgaatacaaccaaacccaaagttatagctcggaatcctcaaaaaacaaataattcgaaatcgaaaacagccagggctcacaatgtatccacatctaataactctcccagcacggacaacgattccatcagtaaatcaactactgaaccgattcaattgaacaataagcacgaccttcatcttaggccagaaacttactgaatctacagtaaatcatactaatcattctgatgatgaactccctggacacctccttctcgattcaggagcatcacgaacccttataagatctgctcatcacatacactcagcatcatctaatcctgacataaacgtagttgatgctcaaaaaagaaatataccaattaacgctattggtgacctacaatttcacttccaggacaacaccaaaacatcaataaaggtattgcacactcctaacatagcctatgacttactcagtttgaatgaattggctgcagtagatatcacagcatgctttaccaaaaacgtcttagaacggtctgacggcactgtacttgcacctatcgtaaaatatggagacttttactgggtatctaaaaagtacttgcttccatcaaatatctccgtacccaccatcaataatgtccatacaagtgaaagtacacgcaaatatccttatcctttcattcatcgaatgcttgcgcatgccaatgcacagacaattcgatactcacttaaaaataacaccatcacgtattttaacgaatcagatgtcgactggtctagtgctattgactatcaatgtcctgattgtttaatcggcaaaagcaccaaacacagacatatcaaaggttcacgactaaaataccaaaattcatacgaaccctttcaatacctacatactgacatatttggtccagttcacaacctaccaaatagtgcaccatcctatttcatctcatttactgatgagacaacaaaattccgttgggtttatccattacacgaccgtcgcgaggactctatcctcgatgtttttactacgatactagcttttattaaaaaccagtttcaggccagtgtcttggttatacaaatggaccgtggttctgagtatactaacagaactctccataaattccttgaaaaaaatggtataactccatgctatacaaccacagcggattcccgagcacatggagtcgctgaacggctaaaccgtaccttattagatgactgccgtactcaactgcaatgtagtggtttaccgaaccatttatggttctctgcaatcgaattttctactattgtgagaaattcactagcttcacctaaaagcaaaaaatctgcaagacaacatgctggcttggcaggacttgatatcagtactttgttacctttcggtcaacctgttatcgtcaatgatcacaaccctaactccaaaatacatcctcgtggcatcccaggctacgctctacatccgtctcgaaactcttatggatatatcatctatcttccatccttaaagaagacagtagatacaactaactatgttattcttcagggcaaggaatccagattagatcaattcaattacgacgcactcactttcgatgaagacttaaaccgtttaactgcttcatatcattcgttcattgcgtcaaatgagatccaagaatccaatgatcttaacatagaatctgaccatgacttccaatccgacattgaactacatcctgagcaaccgagaaatgtcctttcaaaagctgtgagtccaaccgattccacacctccgtcaactcatactgaagattcgaaacgtgtttctaaaaccaatattcgcgcacccagagaagttgaccccaacatatctgaatctaatattcttccatcaaagaagagatctagcaccccccaaatttccaatatcgagagtaccggttcgggtggtatgcataaattaaatgttcctttacttgctcccatgtcccaatctaacacacatgagtcgtcgcacgccagtaaatctaaagatttcagacactcagactcgtacagtgaaaatgagactaatcatacaaacgtaccaatatccagtacgggtggtaccaacaacaaaactgttccgcagataagtgaccaagagactgagaaaaggattatacaccgttcaccttcaatcgatgcttctccaccggaaaataattcatcgcacaatattgttcctatcaaaacgccaactactgtttctgaacagaataccgaggaatctatcatcgctgatctcccactccctgatctacctccagaatctcctaccgaattccctgacccatttaaagaactcccaccgataaattctcgtcaaactaattccagtttgggtggtattggtgactctaatgcctatactactatcaacagtaagaaaagatcattagaagataatgaaactgaaattaaggtatcacgagacacatggaatactaagaatatgcgtagtttagaacctccgagatcgaagaaacgaattcacctgattgcagctgtaaaagcagtaaaatcaatcaaaccaatacggacaaccttacgatacgatgaggcaatcacctataataaagatattaaagaaaaagaaaaatatatcgaggcataccacaaagaagtcaatcaactgttgaagatgaaaacttgggacactgacgaatattatgacagaaaagaaatagaccctaaaagagtaataaactcaatgtttatcttcaacaagaaacgtgacggtactcataaagctagatttgttgcaagaggtgatattcagcatcctgacacttacgactcaggcatgcaatccaataccgtacatcactatgcattaatgacatccctgtcacttgcattagacaataactactatattacacaattagacatatcttcggcatatttgtatgcagacatcaaagaagaattatacataagacctccaccacatttaggaatgaatgataagttgatacgtttgaagaaatcactttatggattgaaacaaagtggagcgaactggtacgaaactatcaaatcatacctgatacaacaatgtggtatggaagaagttcgtggatggtcatgcgtatttaaaaacagtcaagtgacaatttgtttattcgtagatgatatggtattgtttagcaaaaatctaaattcaaacaaaagaattatagagaagcttaagatgcaatacgacaccaagattataaatctaggcgaaagtgatgaggaaattcaatatgacatacttggcttagaaatcaaatatcaaagaggtaaatacatgaaattaggtatggaaaactcattaactgagaaaatacccaaattaaacgtacctttgaatccaaaaggaagaaaacttagcgctccaggtcaaccaggtctttatatagaccaggatgaactagaaatagatgaagatgaatacaaagagaaggtacatgaaatgcaaaagttgattggtctagcttcatatgttggatataaatttagatttgacttactatactacatcaacacacttgctcaacatatactattcccctctaggcaagttttagacatgacatatgagttaatacaattcatgtgggacactagagataaacaattaatatggcacaaacacaaaacctcttccgataaaaacatttaa

SEQ ID NO: 190891 - DNA, 5314 bp, Saccharomyces pastorianus
atggaatcccaacaattacatcaaaatccacattctctacatggtagcgccgctgcttcggttacttctaaggaagtcccatcaaatcaagatccgttagccgtttcagcttccaatttaccggaatttgatagagattccactaaggttaattctcaacaagagacaacacctgggacatcagctgttccagagaaccatcatcatgtctctcctcaacctgcttcagtaccacctccacagaatggacagtaccaacagcacggcatgatgaccccaaacaaagctatggcctctaactgggcacattaccaacaaccatctatgatgacgtgttcacattatcaaacgtcacctgcgtattatcaaccggacccacactatccgctgccacagtatatcccaccgctgagtacttcctcacctgatccaatcgattcacagaatcaacactctgaagtacctcaagctaagacaaaggtgagaaataacgtcttaccaccacacactttaacatcagaagaaaacttttctacatgggttaaattttacatcagatttttgaagaactctaatctcggtgacataattccaaatgaccagggtgaaatcaaaagacaaatgacttatgaagaacatgcgtatatatacaataccttccaagcatttgccccatttcatttattgccaacatgggtaaaacaaattttagaaattaattatgctgacatccttacagtcctttgtaaaagtgtgtccaaaatgcaaactaacaatcaagaattaaaggattggatagctcttgccaaccttgagtacgacggaagtacatctgctgatacatttgaaattacagtcagtacgatcattcagaggctaaaagaaaacaatatcaatgttagcgacagattggcctgtcaactaatacttaaaggtctatccggtgatttcaaatacctacgtaatcaatatcgtaccaaaacgaacatgaaactttcccaattattcgctgaaattcaattaatatatgacgaaaataaaatcatgaatctaaataaaccgtcccaatacaaacaacacagcgaatacaaaaatgtttctcgcacatctccaaacacgactaacacgaaggttacaagtcgtaattatcatagaacaaatagttcaaaaccaagagcagcaaaagctcacaatattgctacatccagtaaattctcaagggtgaacaatgatcacattaatgaatcaaccgtttcatcacaatacttaagcgatgacaacgaacttagtcttaggccagcaacagaaagaatctaagccaacacgcacaatagactcgaatgacgaactacctgatcaccttcttattgattcaggagcttcgcaaacgcttgtcagatcagcccattatttacaccatgcaacacccaattctgaaataaacatagtcgatgctcaaaaacaagacattcctataaatgccattggtaatcttcacttcaactttcagaacggcaccaaaacatcaataaaagcactacacacaccaaacatagcctatgatctattaagtttgagtgagctggctaaccaaaatattactgcctgctttaccagaaacactttagaaagatcggatggtacagtactagctcccatagtcaaacatggagacttttactggttatctaaaaaatacctaattccttcgcacatttcaaagctaacaataaacaacgtcaacaaaagcaaaagcgtaaataaatatccatatccgttaatacatcgaatgcttggacatgctaacttccgaagtattcagaagtctcttaagaagaatgcagttacatatttgaaagaatcggatattgaatggtctaacgctagcacatatcaatgtcctgactgtctaatcggcaaaagcacgaaacataggcatatcaaaggatcacgactaaagtaccaagaatcatatgagccttttcagtacttgcataccgatatatttggtcctgtacatcacttaccgaaaagtgcaccttcttactttatatcgtttacagatgagaaaaccagattccaatgggtctacccattacacgaccgtcgtgaagaatctatcctcaatgtttttacatcgatattagcatttattaagaaccaattcaatgctcgcgttctagttatccagatggatcgtggctccgagtacactaacaaaactcttcataagttctttacgaacagaggtattactgcatgctatacaaccacggcagattctagagcacacggtgtcgctgaacgattaaatcgtactttattaaacgattgtcgcacactgcttcattgcagtggtctaccaaatcatctatggttctcagcagtcgaattttctactataatcagaaattcattagtctcaccaaaaaacgataaatctgcaagacaacatgcaggtttagctggactggacattactactatactacctttcggtcaaccggttatagttaacaaccataatcccgactcgaaaatacatcctcgtggcattccaggttacgccttacatccgtcacgaaactcttatggctatattatctatcttccatcattaaaaaagacagtagatactaccaattacgttatattacaagacaaccaatccaaattggaccaattcaattatgatacactcacctttgatgatgatctcaatcgtttaacagcccataaccaatcttttattgaacaaaatgaaacggagcagtcatatgatcaaaatacagaatctgatcatgactatcaatcggagattgaaataaactctgatcctctagtgaacgatttctcgtcccaatcattgaaccctttacaattagacaaggaaccagtccaaaaggtacgtgcaccaaaagaagttgatgccgacatatctgaatacaatattcttccatctactatacgatctcgtacaccccatatcattaataaagagagtaccgaaatgggtggtaccattgaatcagatactacttcacctagacactcgtctaccttcactgcacgaaaccaaaagcgacctggtagtcccaacgatatgattgatttgacctcacaggatagagttaattatggacttgaaaacatcaaaactacacgtttgggtggtacggaggaaccatatattcaacgaaatagtgatacaaatatcaaatacaggactacaaatagtacgccctcaatagatgaccgttcgtccaacagtgaatccactactcccatcatctccatagaaacaaaggctgtatgtgataatacaccctccattgatacggatccgccagaatatcgatcttctgaccatgcgactcctaatataatgcctgacaaatcctcaaaaaatgttacggctgattctattcttgacgacctcccacttcctgacttaactaataaatctcctacggacacttctgatgtttcaaaagatattccacacatacactctcgtcagactaattccagtttgggtggtatggatgattctaatgttctgactactaccaaaagtaagaaaagatcattagaagataatgaaactgaaattgaggtatcccgagacacatggaataataagaatatgagaagtctggaaccaccaagatcgaagaaacgcataaatttaattgcagcaataaaaggagtgaaatcgatcaaaccagttcgaacgaccttaagatatgatgaagcaattacatataataaagacaacaaagaaaaagacagatatgttgaagcttatcataaagaaattagccaactattgaaaatgaacacttgggatacaaacaaatattatgatagaaatgacatagatcctaaaaaagtaataaactcaatgtttatatttaacaagaaacgtgatggtacacacaaagctagatttgttgcaagaggcgacattcaacaccccgatacatatgattctgatatgcaatccaataccgtacatcactatgcactgatgacgtcattgtcaatcgcattagacaatgactattatatcacacagctggacatatcctctgcttacttatatgctgatatcaaagaagaattatacataagacctccaccacatttaggtttgaatgataagttactacgtttgagaaaatcactctatggtttgaaacaaagtggtgcaaactggtatgaaaccattaaatcatatttaataaattgttgcgacatgcaagaagttcgcggatggtcatgcgtatttaagaatagtcaagtaacaatttgcttattcgttgatgatatgatattattcagcaaagacttaaatgcaaataagaaaatcataacaacactcaagaaacaatacgatacaaagataataaatctgggtgaaggtgataacgaaattcagtacgacatacttggattagagatcaaatatcaaagaagcaagtacatgaaattaggtatggaaaaatccttgacagaaaaattacccaaactaaacgtacctttgaacccaaaaggaaagaaacttagagctccaggtcaaccaggtcattatatagaccaggatgaactagaaatagatgaagatgaatacaaagagaaagtgcatgaaatgcaaaagttgattggtctagcttcatatgttggatataaatttagatttgacttactatactacatcaacacacttgctcaacatatactattcccctctaggcaagttttagacatgacatatgaattgatacagttcatatggaatacgagagataagcaattaatatggcacaaaagcaaacctgttaagccaacaaataaattagttgttataagcgatgcatcgtatggtaaccaaccgtattataaatcacaaattggcaacatatatttacttaatggaaaagtgattggaggaaagtcgacaaaggcttcgttaacatgcacttcaactacagaagcagaaatacacgcagtcagtgaagctataccgctattgaataacctcagtcaccttgtgcaagaacttaacaagaaaccaattattaaaggcttacttactgatagtagatcaacgatcagtataattaagtctacaaatgaagagaaatttagaaacagattttttggcacaaaggcaatgagacttagagatgaagtatcaggtaataatttatacgtatactacatcgagaccaagatgaacattgctgatgtgatgacaaaacctcttccgataaaaacatttaaactattaactaacaaatggattcattag

SEQ ID NO: 190892 - DNA, 1866 bp, Saccharomyces pastorianus
atgttcgaccaattagcagtctttacccctcaaggtcaagtactttaccaatataactgtttaggaaaaaagttttctgaaatacaaattaacagctttatatcccagctgattacttccccagtaactagaaaagaaagtgttgcaaacgcaaatacagacggatttgatttcaatcttttaacaatcaacagcgaacacaaaaattctccttcatttaatgcactattttatttgaataagcaaccagaattgtatttcgtagtgacttttgccgagcagactttagagcttaatcaagaaactcaacaaacacttgcactggtgttaaaactctggaactcattgcatttaagtgaatccattctaaaaaatcgtcagggccaaaacgaaaagaacaagcataactacgtcgatattcttcagggaattgaagacgacctgaagaaatttgagcaatattttaggataaaatatgaagagtcaataaaacaagaccatatcaatccagataattttaccaaaaatggatcagtaccccaatcgcataataaaaataccaagaaaaaattgagggatacaaaaggtaagaagcaatctacaggaaatgttggtagtgggagaaagtggggccgtgatggtggcatgcttgatgaaatgaatcatgaagatgcagccaaattagatttctcatcatccaacagccacaatagtagccaagtagctctagactccactattaataaagattcttttggggatagaacagaaggaggcgatttcttaatcaaagaaattgatgatcttttgtcttctcataaagacgagataactagtgggaacgaagctaaaaattctggatacgtcagtacagcttttggattccttcaaaaacacgttctaggtaacaaaacgatcaatgaaagtgatttgaaatctgtattagagaagttaacacaacaattgataaccaaaaatgtagcaccagaggcagcagactatttaacacagcaagtctcacatgatcttgtaggctcaaaaactgcaaattggaccagtgttgagaatactgctcgtgaatctttaacaaaagcattaactcaaatattaacgcctggtgtatccgttgatctcctccgtgaaattcagagcaaaagaagcaaaaaggatgaagaaggtaaatgtgatccctatgtgttctctatagttggtgttaatggtgttggtaagtcaacaaatctttcaaagctagcgttttggttactgcaaaataatttcaaggtcttaattgttgcttgtgatacgtttaggtctggtgcagttgagcaactaagggtccatgttgaaaatttggcacagctaatggatgattcacacgttcgtggctccaagaacaaaaggggtaaaactggtaatgactacgttgaactatttgaagctggttatggtggatctgacttggtaaccaaaattgcaaagcaagccatcaaatattctcgtgatcaaaacttcgatatagtgttaatggatactgccgggagaaggcataatgatcctactttaatgtcgccattgaagtctttcgctgaccaagccaagccagataaaatcattatggttggagaggctttagtaggtactgattctgtccagcaagccaaaaattttaatgatgccttcggaaagggaagaaatcttgacttctttattatctccaagtgtgacacagttggtgaaatgctgggtactatggtaaatatggtttatgctacggggattcctatcttattcgttggcgtgggacaaacctataccgatttgaggacattaagcgtaaaatgggctgttaatacattaatgtcttaa

SEQ ID NO: 190893 - DNA, 660 bp, Saccharomyces pastorianus
atgccagctaaaaaaaggactagaaagacagtgaaaaaaaccgtatcattctccgatgacacaacattaacaacgcaccaaaatcgtgagaaaaagaacgtagatcatgatcgtccacctgtgtatgtgaggaaaacccctctgatgacatttccataccatttagtagcactactttattactacgtttttgtatcttcaaatttcaatacggtgaagttgctaagttttttgattcctacacaagttgcttatttagttttacaattcaataaatgcacagtttacggtaacaaaatcattaagatcaattactcattgaccattatttgtctaggtgttacatttttgttgagctttcccacaatgttattaactatattatttggtgcgccattaatggacttattgtgggaaacctggctgttgtcactgcattttgcatttttagcataccctgcagtttattctgtatttaattgtgatttcaaagtgggattatggaagaagtattttatctttatcgttgtagggggttggattagttgtgttgtcattcctttggattgggatagagattggcagaattggccaattcctattgttgttggaggttatttgggcgctttggtgggctatactatcggtgcctatatataa

SEQ ID NO: 190894 - DNA, 678 bp, Saccharomyces pastorianus
atgaagcttcaatttttttcctttattaccttatttgcttgtctcttcacaacagccatttttgcgaaagaggacacggcagaagatcctgagatcacacacaaggtctactttgacattaatcacggtgataaacaaattggtagaattgttatgggattgtatggtctcaccacaccccaaaccgttgaaaacttttaccagttgaccatttccagggaccctaagatgggttatttgaactctatcttccatcgcgttattcctaacttcatgattcaaggtggcgatttcactcacagatcaggtattgggggtaagtctatcttcggaaacacgttcaaagatgagaattttgatgtcaaacatgacaaaccaggcagattgtctatggccaatcgtggtaaaaacaccaacggatcccaatttttcatcaccaccgtcccatgcccatggttggacggtaagcacgttgtctttggagaagtcttggatggtatggacgtagttcactacattgaaaacgttaagaccgacagtagaaatatgcctgtaaaggaagttattattgtggaaagtggtgaactggaaactgttcctttggacaataaagacgccgccaagctacaggaagagatcaaagcggaagctagcgaagcagcccacgatgaactctaa

SEQ ID NO: 190895 - DNA, 743 bp, Saccharomyces pastorianus
atgatcttaagcaaaacaaagaaacctaaaagcatgaataagccaatatatttcagcaagtttcttgtaactgaacaagttttctatgtatgcactctcatatgtttttttgtaccccattcgcaccattgcgttactaactatatggagaccttataatctctgcttctttacagaagtcaaaatatacgtatgcattggtaaacttgaaaccaattgtacccggacatgtactgatcgttccactgagaactacggttttaaacttatcagatctgaccatgcctgaatctcaagattatttcaagactttacagttaatacatagatttattaagtggcaatataaggctgactctatcaacgttgccatccaagatggacctgaggccggacagtcggtaccccacttgcatacacacattattccacgttataaaataaacaatgtaggggatttaatatacgataaattagatcattgggatggtaatgggactttgactgattggcaaggaagaagagacgaatatttgggtgttggtggtaggcaagcaagaaaaaataactctacatcggccactgtagacggggatgaactctcacaaggtcctaatgtcttgaagccagacagtcaaaggaaggttcgagctttaaccgaaatgaaaaaagaagctgaggatcttcaagccagactagaagaatttgtatcttctgatcctggtttaacacaatggttatag

SEQ ID NO: 190896 - DNA, 1713 bp, Saccharomyces pastorianus
atgtcacaagacgctgctattgcagagcaaactcctgtggagcatctctctgctgttgactcagcctcccactcggttttatctacaccatcaaacaaggctgaaagagatgaaataaaagcttatggtgaaggtgaagagcacgaacctgtcgttgaaattccaaagagaccagcttctgcctatgtcactgtctctattatgtgtatcatgatcgcctttggtggtttcgttttcggttgggatactggtaccatttctggtttcatcaatcaaaccgatttcatcagaagatttggtatgaagcataaagatggtactaattatttgtctaaggttagaactggtttgattgtctccattttcaacattggttgtgccattggtggtattattctttccaaattgggtgatatgtacggtcgtaaggtgggtttgattgtcgttgttgtcatctacatcatcggtattattattcaaattgcatctatcaacaaatggtaccaatatttcatcggtagaattatttccggtttgggtgttggtggtattgccgttttatctcctatgttgatttctgaagtatccccaaagcatttaaggggtactttagtctcttgctaccaattgatgattactgccggtattttcttgggttactgtaccaacttcggtactaagaactactccaactctgtgcaatggagagttccattaggtttgtgttttgcctgggctttgtttatgattggtggtatgacatttgttccagagtctccacgttatttggctgaagtcggtaagatcgaagaagccaaacgttctattgccgtttctaacaaggttgctgttgatgatccatctgttttggctgaagtcgaagctgtcttggctggtgtagaggcagagaaattagctggtaatgcatcctggggtgaattgtttagtagcaagacaaaggtccttcagcgtttgatcatgggtgctatgattcaatctctacaacaattgacaggtgataactatttcttctactatggtactactattttcaaggctgttggtttgagtgactctttcgaaacctctattgtcttgggtattgttaactttgcttccacctttgttggtatttacgttgttgagagatatggtcgtcgtacttgtttgctatggggtgctgcatccatgactgcttgtatggttgtctatgcttccgtgggtgtcaccagattatggccaaatggtcaagaccaaccatcttccaagggtgctggtaactgtatgattgtctttgcctgtttctatattttctgttttgctactacatgggctccaattccttatgtcgttgtttctgaaactttcccattgagagtcaagtctaaggctatgtctattgctacagctgctaattggttgtggggtttcttgattggtttcttcactccatttattactggtgctattaacttctactacggttacgttttcatgggctgtttggtcttcatgttcttctatgttttgttagttgttccagaaactaagggtttgactttggaagaagtcaacaccatgtgggaagaaggtgttctaccatggaagtctgcctcatgggttccaccatccagaagaggtgccaactacgacgctgaagaaatgactcacgatgacaagccattgtacaagagaatgttcagcaccaaataa

SEQ ID NO: 190897 - DNA, 444 bp, Saccharomyces pastorianus
atggcctttctgtcctggacattttttccttccttttttcatttccttgaaaggaacagattttttttgacttttgccacacagctgcactatctcaaccccttttacattttaagttttcgggttgaatggcatcaaatttgggaaaatttagcttactcagacaccaacacattttttcatgagtattgttggaaaatctttccatgcttatcagccggaatacggaacaacggctgctgtgatgccgcaaaggggcaaggaaaaaataagcaacacacaccgaaacaggaggaagaaattccgaacacaagcctaagaagacaccgcagttgttgcaacatgttcacatgttcatccccctgctactacttggaaattaatgtaggggtaattggagtgcgccggcccgtgctttcagaggaacaaaggaagaattgttaa

SEQ ID NO: 190898 - DNA, 1368 bp, Saccharomyces pastorianus
atgggtttagtagacggttatgacacaagctcagactctgatttgaacttcgacgaaggcaaatctgttcatgaaaagaaaaatggtaatttgcatgaagatacttcgtatgaaccttcttcaaataatattcataagagaaaatcacattttacaaagtcagaactaaaaagaagacggaaaactcgcaaaggagatgggccgtggggcagttggtcaagtagtgacgatgaaacttcacaagccagcgaaactcagaaagaagatcaggatatcttcgtgcacgcgctggctgaggacaacctagattcggaacagatagaggtagaggaagtctcccatttttatggtaaatcagaaaaggactatcaaggcagaggatatttatatccaccaaatgacgtcgatgttgatcttcgtgaggaaaggatatcctttcggtgttacttaccaaaaaaagttatacgtaattatccggggcatccagaaggaaccactgccctgaaattcttacctaaaactggacacttaattctctctggtggtaatgatcatactataaaaatttgggatttctaccatgactatgaatgcctacgagattttcaaggtcataacaagcctattaaagcattacgattcaccgaagactgtcaatcttttttgagctcttcctttgatagaagcgttaaaatttgggatactgaaactggtaaagtgaaaaccaggttgcaccttaattcaacgcctgcagatgttgaatctcggcccactaacccacatgagttcattgtaggtttatcgaattcgaaaatattacattatgatgatcgtgtttcagaaaatcaaggtcttgtgcagacatatgatcatcacctaagtagcattctggctctcaagtattttcccgatggttcgaagtttatttcttcttcagaggataagacggtaagaatttgggaaaatcagatcaatgtaccaataaaacaaataagtgacacggctcaacattctatgccatttttaaatgtacatccgtctcagaactatttctgtgcacaaagcatggataatagaatatattctttcagtttgaaacccaaatataagaggcatccaaaaaagatatttaaagggcattcatctgctggttatgggataagcttggctttttctggtgatggtcgttacatatgttcaggcgattcaaaaagcagactatttacttgggattggaatacgtcgcgcttattaaataacatcaagattccaggcaacaagcctataactcaagtggactggcatcctcaagaaacaagtaaagtcatttgcagcggagcggcaggtaagatatatgtatgtgactag

SEQ ID NO: 190899 - DNA, 5269 bp, Saccharomyces pastorianus
atggaatcccaacaattatctcaacattcacccatttctcatggtagcgcctgtgcttcggttacttctaaggaagtccacacaaatcaagatccgttagacgtttcagcttccaaaacagaagaatgtgagaaggcttccactaaggctaactctcaacagacaacaacacctgcttcatcagctgttccagagaacccccatcatgcctctcctcaacctgcttcagtaccacctccacagaatgggccgtacccacagcagtgcatgatgacccaaaaccaagccaatccatctggttggtcattttacggacacccatctatgattccgtatacaccttatcaaatgtcgcctatgtactttccacctgggccacaatcacagtttccgcagtatccatcatcagttggaacgcctctgagcactccatcacctgagtcaggtaatacatttactgattcatcctcagcggactctgatatgacatccactaaaaaatatgtcagaccaccaccaatgttaacctcacctaatgactttccaaattgggttaaaacatacatcaaatttttacaaaactcgaatctcggtggtattattccgacagtaaacggaaaacccgtacgtcagatcactgatgatgaactcaccttcttgtataacacttttcaaatatttgctccctctcaattcctacctacctgggtcaaagacatcctatccgttgattatacggatatcatgaaaattctttccaaaagtattgaaaaaatgcaatctgatacccaagaggcaaacgacattgtgaccctggcaaatttgcaatataatggcagtacacctgcagatgcatttgaaacaaaagtcacaaacattatcgacagactgaacaataatggcattcatatcaataacaaggtcgcatgccaattaattatgagaggtctatctggcgaatataaatttttacgctacacacgtcatcgacatctaaatatgacagtcgctgaactgttcttagatatccatgctatttatgaagaacaacagggatcgagaaacagcaaacctaattacaggagaaatctgagtgatgagaagaatgattctcgcagctatacgaatacaaccaaacccaaagttatagctcggaatcctcaaaaaacaaataattcgaaatcgaaaacagccagggctcacaatgtatccacatctaataactctcccagcacggacaacgattccatcagtaaatcaactactgaaccgattcaattgaacaataagcacgaccttcaccttaggccaggaacttactgaatctacggtaaatcacactaatcattctgatgatgaactccctggacacctccttctcgattcaggagcatcacgaacccttataagatctgctcatcacatacactcagcatcatctaatcctgacataaacgtagttgatgctcaaaaaagaaatataccaattaacgctattggtgacctacaatttcacttccaggacaacaccaaaacatcaataaaggtattgcacactcctaacatagcctatgacttactcagtttgaatgaattggctgcagtagatatcacagcatgctttaccaaaaacgtcttagaacgatctgacggcactgtacttgcacctatcgtacaatatggagacttttactgggtatctaaaaggtacttgcttccatcaaatatctccgtacccaccatcaataatgtccatacaagtgaaagtacacgcaaatatccttatcctttcattcatcgaatgcttgcgcatgccaatgcacagacaattcgatactcacttaaaaataacaccatcacgtattttaacgaatcagatgtcgactggtctagtgctattgactatcaatgtcctgattgtttaatcggcaaaagcaccaaacacagacatatcaaaggttcacgactaaaataccaaaattcatacgaaccctttcaatacctacatactgacatatttggtccagttcacaacctaccaaatagtgcaccatcctatttcatctcatttactgatgagacaacaaaattccgttgggtttatccattacacgaccgtcgcgaggactctatcctcgatgtttttactacgatactagcttttattaagaaccagtttcaggccagtgtcttggttatacaaatggaccgtggttctgagtatactaacagaactctccataaattccttgaaaaaaatggtataactccatgctatacaaccacagcggattcccgagcacatggagtcgctgaacggctaaaccgtaccttattagatgactgccgtactcaactgcaatgtagtggtttaccgaactatttatggttctctgcaatcgaattttctactattgtgagaaattcactagcttcacctaaaagcaaaaaatctgcaagacaacatgctggcttggcaggacttgatatcagtactttgttacctttcggtcaacctgttatcgtcaatgatcacaaccctaactccaaaatacatcctcgtggcatcccaggctacgctctacatccgtctcgaaactcttatggatatatcatctatcttccatccttaaagaagacagtagatacaactaactatgttattcttcagggcaaggaatccagattagatcaattcaattacgacgcactcactttcgatgaagacttaaaccgtttaactgcttcatatcattcgttcattgcgtcaaatgagatccaagaatccaatgatcttaacatagaatctgaccatgacttccaatccgacattgaactacatcctgagcaaccgagaaatgtcctttcaaaagctgtgagtccaaccgattccacacctccgtcaactcatactgaagattcgaaacgtgtttctaaaaccaatattcgcgcacccagagaagttgaccccaacatatctgaatctaatattcttccatcaaagaagagatctagcaccccccaaatttccaatatcgagagtaccggttcgggtggtatgcataaattaaatgttcctttacttgctcccatgtcccaatctaacacacatgagtcgtcgcacgccagtaaatctaaagatttcagacactcagactcgtacagtgaaaatgagactaatcatacaaacgtaccaatatccagtacgggtggtaccaacaacaaaactgttccgcagataagtgaccaagagactgagaaaaggattatacaccgttcaccttcaatcgatgcttctccaccggaaaataattcatcgcacaatattgttcctatcaaaacgccaactactgtttctgaacagaataccgaggaatctatcatcgctgatctcccactccctgatctacctccagaatctcctaccgaattccctgacccatttaaagaactcccaccgataaattctcgtcaaactaattccagtttgggtggtattggtgactctaatgcctatactactatcaacagtaagaaaagatcattagaagataatgaaactgaaattaaggtatcacgagacacatggaatactaagaatatgcgtagtttagaacctccgagatcgaagaaacgaattcacctgattgcagctgtaaaagcagtaaaatcaatcaaaccaatacggacaaccttacgatacgatgaggcaatcacctataataaagatattaaagaaaaagaaaaatatatcgaggcataccacaaagaagtcaatcaactgttgaagatgaaaacttgggacactgacgaatattatgacagaaaagaaatagaccctaaaagagtaataaactcaatgtttatcttcaacaagaaacgtgacggtactcataaagctagatttgttgcaagaggtgatattcagcatcctgacacttacgactcaggcatgcaatccaataccgtacatcactatgcattaatgacatccctgtcacttgcattagacaataactactatattacacaattagacatatcttcggcatatttgtatgcagacatcaaagaagaattatacataagacctccaccacatttaggaatgaatgataagttgatacgtttgaagaaatcactttatggattgaaacaaagtggagcgaactggtacgaaactatcaaatcatacctgatacaacaatgtggtatggaagaagttcgtggatggtcatgcgtatttaaaaacagtcaagtgacaatttgtttattcgtagatgatatggtattgtttagcaaaaatctaaattcaaacaaaagaattatagagaagcttaagatgcaatacgacaccaagattataaatctaggcgaaagtgatgaggaaattcaatatgacatacttggcttagaaatcaaatatcaaagaggtaaatacatgaaattaggtatggaaaactcattaactgagaaaatacccaaattaaacgtacctttgaatccaaaaggaagaaaacttagcgctccaggtcaaccaggtctttatatagaccaggatgaactagaaatagatgaagatgaatacaaagagaaggtacatgaaatgcaaaagttgattggtctagcttcatatgttggatataaatttagatttgacttactatactacatcaacacacttgctcaacatatactattcccctctaggcaagttttagacatgacatatgagttaatacaattcatgtgggacactagagataaacaattaatatggcacaaaaacaaacctaccaagccagataataaactagtcgcaataagcgatgcttcatatggtaaccaaccatattacaagtcacaaattggtaacattttcctactcaacggaaaagtgattggaggaaagtcgacaaaggcttcgttaacatgcacttcaactacagaagcagaaatacacgcagtcagtgaagctataccgctattgaataacctcagtcaccttgtgcaagaacttaacaagaaaccaattattaaaggcttacttactgatagtagatcaacgatcagtataattaagtctacaaatgaagagaaatttagaaacagattttttggcacaaaggcaatgagacttagagatgaagtatcaggtaataatttatacgtatactacatcgagaccaagaagaacattgctgatgtgatgacaaaacctcttccgataaaaacatttaaactattaactaacaaatggattcattag

SEQ ID NO: 190900 - DNA, 1182 bp, Saccharomyces pastorianus
atgtttaataatcatgaaattgacaccatattaagcactctccgcatggaggcagatccctctttgcatcctttattcgaacaatttgagaaattttatgaagagaaattgtggttccaattgtccgaatccttgactaaattttttgatgatgctaaatctacaccattgaggctcagattatatgataacttcgtttctaaattttatgataaaatcaaccaattgtcagtagtaaagtatctacttgcctctttgaaggattctaaggatttcgatgagtctttaaaatatttggatgatttgaaggctcaatttcaagaattggactctaaaaaacaaagaaataatggatcaaaagaccatggtgatggtattttgttgatagatagcgaaattgctagaacttacctgttaaagaacgacctcgttaaggcaagagatttattagatgatttggaaaagacattggataaaaaggattccattccattaaggataacaaacagcttctattctacaaattcccagtattttaaatttaaaaatgatttcaattctttctactacacaagtctattatacctttctaccttagaaccatctacaagcattactttagccgaacgtcaacaattggcctatgatttgagtatctcagcattgttaggtgacaaaatctataattttggcgaactattacaccatccaataatggaaactatagtcaacgattccaattacgattggcttttccaattattaaatgctctaaccgttggtgattttgataaattcgactcattgataaaagttcaaatatcaaagattcctatattggctcaacatgaatcatttttacgacaaaaaatttgcctaatgacattaattgaaacagtttttgtcaaaaatattaggatgctttcatttgaagatatttcaaaggctacacacctaccaaaggataatgtcgaacacctggtcatgagagccataagtttgggtctattaaagggttctattgaccaagtaaatgaactcgttaccatctcctgggtccaaccaagaatcataagtggtgaccaaattacaaagatgaaggacagactggttgaatggaacgatcaagtagaaaaactgggcaaaaaaatggaagctcgtggccaatccatctgggtttag

SEQ ID NO: 190901 - DNA, 441 bp, Saccharomyces pastorianus
atgacaatcctccaccaatcagaagatcaaatagaggtggcttcagaggtcgcggcggcttcagaggcggcttcagaggtggcttcagaggcggtttctccagaggcggcttcggtggccccagaggtggatttggtggtccaagaggtggttacggtggctattccagaggtggctacggtggctactccagaggcggatatggtggctccagaggtggttacgatagtcctagaggtggttacgatagtccaagaggtggttattccagaggtggctatggtggtccaagaaatgattacggtcctccaagaggtagctacggtggttcaagaggtggttatgatggtccaagaggcgattatggtcctccaagagatgcatacagaaccagagatgctccacgtgaaagatcaccaaccaggtaagccatttatatag

SEQ ID NO: 190902 - DNA, 795 bp, Saccharomyces pastorianus
atggctaaatttttgaaagcaggtaaagttggtacgtaaatttaacagagcaaacgctctaattaagatatcgaataaaaggggactttcaggtgcataagatgggaaattgtacaatctgagggacaaacaatatggaaagcagtacatgattgtattgtcattgtaggaggtaccaattgtgccagtaaaaaagagagggcccggggagcaccacattcacgaccaatcgtgtcgatctgcaaaaaaggcacatggaaaatgtaatttatcagtgttcaacactgagttgaacagatagctatctaatcaatgttaactttccagggaacaaaaagctaaatccacttctcttttatttcaaaatatcattagaaatagaaaaatttactaacaaattttcgtattatcgtagctgtcgttgttcgtggtcgttacgctggtaagaaggttgtgatcgttaagccacacgatgagggttctaaatctcatccattcggtcacgctttggttgccggtattgaaaggtacccatcaaaggtcaccaagaagcacggtgccaagaaggtcgctaagagaactaaaatcaagccattcatcaaagtcgtcaactacaaccacttattgccaaccagatacaccttggatgttgaagctttcaagagcgttgtatctacagagacttttgaacaaccatcccaacgtgaagaagccaagaaggttgtaaagaaggcatttgaagaaagacatcaagctggtaaaaaccaatggttcttctccaagttgagattctaa

SEQ ID NO: 190903 - DNA, 117 bp, Saccharomyces pastorianus
atgttatataatatgaattatttagttttttcattactatggtattttttggtgggtggggggaagggagaggtttgttggcgttttttaggcattgttaagagtcctaatacgtag

SEQ ID NO: 190904 - DNA, 300 bp, Saccharomyces pastorianus
atggcccatctctcactaaatcagtacaaatgcactcacatcattatacacggcacttgcctcagcggtctataccctgtgccatttacccataacgcccatgattatccacattttaatatctatatctcattcggcggccccaaatattgtaaaactgctcttaatacatacgttataccgcttttacaccgtatactaaccactcaatttatatacacttatgccaatattacagaaaaatcaccaccaaaatcacctaaacataaaaatattctatccttcaacaataatacataa

SEQ ID NO: 190905 - DNA, 429 bp, Saccharomyces pastorianus
atgtccctacggccttgtctaacaccatccagcatgcaatacagtgacatatatatacacaccacaccacacccacacacaccacaccacacccaccacacccacaccacacccacacccacaccacacccacacacccacacacccacaccagagagaagcctaagcctaagactaagacaagccaagcctgaccaacctgtctctcaaattaccctccattaccctacctccccactcgttaccctgactcattcaactataccaccccaaccaccatccatctccctgtgtactaccaccaaccgaccgtccaccataaccgttaccctccaattacccatatccaactccactaccacttaccctaccatctcccatctactactcaccatactattgttctacccaccactattgaaacgctaa

SEQ ID NO: 190906 - DNA, 780 bp, Saccharomyces pastorianus
atgaggtatgtttgataagatatatacgtatatttatatatcactcttctgagaaagtatgccatagaatgaggatcactaacaaagaaaatgtcaatgaacttcaaagatatcgtttaatgaaacagtagctctaaaagaaggatcgagacagatgttatgaaactgttgatgagtgatcatcaagtggatttaatcaatgatagcatgcaagagtttcatgtaaagttcttgggaccaaaggatacaccctacgaaaatggggtttggaggttacatgtagagttgccggataattacccatacaagtcgccaagcatagggttcgttaacaagatattccatcctaacattgatatcgcatcggggtccatatgtttggacgtaattaactctacatggtcgcctttatatgatctgataaatatagtggagtggatgataccaggtttattaaaggagcctaatggtagcgatcccttgaataacgaagctgccacattgcaattacgagataaaaaactgtatgaggaaaaaatcaaagagtatatagacaagtatgctacaaaggaaaagtaccaacaaatgtttggcggagataatgatagcgatgacagtgatagcggcggtgatttacaagaagaggacagtgattctgatgaagatatggatggcactggtgtttccagtggcgatgatagcgtagatgagttaagcgaggatctaagtgacatagatgtcagtgatgacgatgactacgacgaagtcgcaaatcaataa

SEQ ID NO: 190907 - DNA, 612 bp, Saccharomyces pastorianus
atgggttcttcattcgtaatagatcgatcctcttcgtcaccagcgccaccacggggacccgccccgaaattgagtgcacatgctcgcaagataatatgcaaaatatcacccaatcggtcctttttgttcatcatatcgttacatatctgtgaaaagtactttatctcaatgggtttacgtgggcatagatcacgcttcagccgctctgtgtcgactttcttttcgccaggtaaacttgcttgcatagctcatctacgtgtaggctgccaaattgtacccatatttccttatggtgcttttctgaagactccttacaataggtgcgccggaaacaaagtcagtgaaagtacgcatcgtagagctgtcgttcggcctagcactcgctatttcgtgacaacgttccaggacacggaaactcaactcattatagtatcctctgttgaggtaaaaaagagaaagggtatcgtaatcctttctattgaatttcaaagtatgcacttgaaacaacgtgtagaccatcacgtggtttgtttgaagggattggtccgccctggaaatctggttcgtcttcaacaaacgtcaggaacttttttacatttttcccgaccatga

SEQ ID NO: 190908 - DNA, 219 bp, Saccharomyces pastorianus
atgagcaagcataagcatgaatggacggaatcagtggccaactctgggccggcttcaatcttatcttactgcgcgtcctcgattttgatgacagtaacgaacaaattcgtggttaacctggacaactttaacatgaactttgtgatgttgtttgtacaatcactggtgtgcactgtgacgctatgtatcctacgaattgtaggcgttgctaatttttga

SEQ ID NO: 190909 - DNA, 330 bp, Saccharomyces pastorianus
atgcagaacatattttatcgatccgcttatgtgcacacagtttgtccagctaggctagaatattatttattattaccattattattatattattattattattatcatcatcatgaacctgatgatccgaattgtgaagcccacttttcgtacttcactaatccgtcctgggatacagagggcttgatatacactaaactgttcttaaaatccacaaggcctatgggtcttatcatctccctctctgtttctaataacttatcacccagatctcgtagtgggcccatggcagcatccttcgctaaagacgttatatcacttcctgaatag

SEQ ID NO: 190910 - DNA, 763 bp, Saccharomyces pastorianus
atggcccaacgtgttactttcagaagaagaaatccatgtatgttaaaggcacacttataaattacgagaaattctgacgagatgatgattattcaactaaaaaagagcaagagaggagaggataccatgtcaggggtcctagtatagttatcaaaagcaatttaccccgtttttgtaatccactatcaataacttattctgcgcgaaatattgtgtccagaaataatacaatattagtagcaatgagaagaaaaacgatagttaataagagcagccacttttaaccctgatactgactagagctaataatctcaatctgtgttacgaaaatttcttttaaagttttctcgaactccttcctattgaaacatttcgtactaacatatttttcaaatgagaaagtataccaactttctgaaaacattttcaaatagacaacacccgttctaacaaaatcaaggttgttaagaccccaggtggtattttgcgtgcccaacatgtcaagaagttagctaccagaccaaagtgtggtgactgtggtagcgctttgcaaggtatctctactttgagaccaagacaatacgccactgtttccaagacccacaagactgtttccagagcttacggtggttccagatgtgccaactgtgttaaggaaagaattattagagctttcttgatcgaagaacaaaaaattgtcaagaaggttgtcaaggaacaaaccgaagctgccaagaaatctgaaaagaaggctaagaaataa

SEQ ID NO: 190911 - DNA, 1593 bp, Saccharomyces pastorianus
atgccagaaaagttagccatgtcaatggtcgatataaaagatgcggggagtgaactaagggacctcgaatctggagctctggacacaaaatcttccgccgctgatgtatactatgagggtgtagaattgcatagaaccaacgaattcattgataataagccgtcctttttcaataggattgcagctgctttaaatgctgagacgaaaggtattgaaccagttacagaagatgaaaaaaatgatgactcgatactcaatgccgccactatatggttttcagctaatatggtgattgtagcctattccgtaggtgccttgggtcctctagtatttggcctaaatttcggccaaagtgttttagttatcatttttttcaatattttgggtttgatccctgttgcattattctcactttttggggtagaactgggcctaagacagatgattctatcgagatatttggctggtaacatcacagcaagatttttctctcttgttaatgtcattgcttgtgtcggttggtgtgttttaaatatttctgtttctgctcaacttttgaatatggtgaatgaaggctctgggcacaactgtcctatttgggcaggttgtttgattattgctggtggtaccgtgcttgtgactttttttggttacagtgtcgttcatgcatacgaaaaatggtcgtgggtacccaattttgctgcctttttggtcattattgcccaactatcgagatcaggaaaatttaaaggtggtgaatgggtagggggtgcaactactgcaggtggtgttctttcttttggttcatctgtttttgggtcagctgcgggttgggcgacttatgcagcagattacactgtttatatgccaaagaccacaagtaaatacaaaatttttttttccgtagtagccggtctagcgttccctctatttttcaccatgattcttggtgctgcttgcggtatggcggcccttaatgacccaacctggaagtcatattatgataaaaacgccatgggtggtgtcatatatgctatcctggtccctaactctctaaacggattcggtcaattctgctgtgttttgttggctctttcaactgttgctaataatgtccctggaatgtacactgtcgctttatccgctcaagctttgtgggcacctttggctaaaataccaagagtagtctggacaatggcaggtaatgctgccactttaggtatttccatccctgctacctattactttgacggctttatggagaattttatggattccattggttattatttggctatttatattgccattgcatgttcagagcattttatttataggcgttccttcagtgcttacaatattgatgattgggataattgggagcatctacctatcggtatcgcaggtactgctgccttaattgctggtgcctttggagtagcgttgggtatgtgccaaacttattgggttggtgagatcagtcgtttgatcggagagtacggcggtgacattgggttcgagttaggcggaagttgggcgttcatcatctataacattgtaagacctttagaactcaaatatttcggtcgatga

SEQ ID NO: 190912 - DNA, 874 bp, Saccharomyces pastorianus
atggtatgttaaaaagtgctcagatgaaagatgacgtcccatattccatgttaaagttgccatgagttagtataaaaggcaataaaggtaccataacgagaaaagaaagtaaaagaagaaatgttttgcaaatttaaggtggcgtaacagcaactattggctaatatattaatggcaatcattgtgaaaagaaatgtgaaatccgtatcgtaattggttaaatttataactcaaatttaaacactcgaatagctgacccgtaatattttatcccgctttaagagttcaacgctaaaaaatgatatctagctaaccattatgctacaggaaccttttttggactattatccctatcatgaaaactggaaggatctttcaaggacgccatttccaaagatttcccccacactggaacctattttactaacaatttttaaaatggttttttacctaaattgttttttctcagtctgacgctgttactatccgtactagaaaggttatctccaacccattgttggccagaaagcaattcgtcgtcgacgtcttgcacccaaacagagctaatgtctccaaggatgaattgcgtgaaaaattagctgaagtctacaaggctgaaaaggacgctgtctccgttttcggtttcagaacccaatttggtggtggtaagtctgttggtttcggtttggtctacaactctgttgccgaagctaagaagttcgaaccaacttacagattagtcagatacggtttggctgaaaaggttgaaaaggcttccagacaacaaagaaagcaaaagaagaacagagacaagaagatcttcggtactggtaagagattggctaagaaggttgctcgtcgtaacgccgattaa

SEQ ID NO: 190913 - DNA, 5269 bp, Saccharomyces pastorianus
atggaatcccaacaattatctcaacattcacccatttctcatggtagcgcctgtgcttcggttacttctaaggaagtccacacaaatcaagatccgttagacgtttcagcttccaaaacagaagaatgtgagaaggcttccactaaggctaactctcaacagacaacaacacctgcttcatcagctgttccagagaacccccatcatgcctctcctcaacctgcttcagtaccacctccacagaatgggccgtacccacagcagtgcatgatgacccaaaaccaagccaatccatctggttggtcattttacggacacccatctatgattccgtatacaccttatcaaatgtcgcctatgtactttccacctgggccacaatcacagtttccgcagtatccatcatcagttggaacgcctctgagcactccatcacctgagtcaggtaatacatttactgattcatcctcagcggactctgatatgacatccactaaaaaatatgtcagaccaccaccaatgttaacctcacctaatgactttccaaattgggttaaaacatacatcaaatttttacaaaactcgaatctcggtggtattattccgacagtaaacggaaaacccgtacgtcagatcactgatgatgaactcaccttcttgtataacacttttcaaatatttgctccctctcaattcctacctacctgggtcaaagacatcctatccgttgattatacggatatcatgaaaattctttccaaaagtattgaaaaaatgcaatctgatacccaagaggcaaacgacattgtgaccctggcaaatttgcaatataatggcagtacacctgcagatgcatttgaaacaaaagtcacaaacattatcgacagactgaacaataatggcattcatatcaataacaaggtcgcatgccaattaattatgagaggtctatctggcgaatataaatttttacgctacacacgtcatcgacatctaaatatgacagtcgctgaactgttcttagatatccatgctatttatgaagaacaacagggatcgagaaacagcaaacctaattacaggagaaatctgagtgatgagaagaatgattctcgcagctatacgaatacaaccaaacccaaagttatagctcggaatcctcaaaaaacaaataattcgaaatcgaaaacagccagggctcacaatgtatccacatctaataactctcccagcacggacaacgattccatcagtaaatcaactactgaaccgattcaattgaacaataagcacgaccttcaccttaggccaggaacttactgaatctacggtaaatcacactaatcattctgatgatgaactccctggacacctccttctcgattcaggagcatcacgaacccttataagatctgctcatcacatacactcagcatcatctaatcctgacataaacgtagttgatgctcaaaaaagaaatataccaattaacgctattggtgacctacaatttcacttccaggacaacaccaaaacatcaataaaggtattgcacactcctaacatagcctatgacttactcagtttgaatgaattggctgcagtagatatcacagcatgctttaccaaaaacgtcttagaacgatctgacggcactgtacttgcacctatcgtaaaatatggagacttttactgggtatctaaaaagtacttgcttccatcaaatatctccgtacccaccatcaataatgtccatacaagtgaaagtacacgcaaatatccttatcctttcattcatcgaatgcttgcacatgccaatgcacagacaattcgatactcacttaaaaataacaccatcacgtattttaacgaatcagatgtcgactggtctagtgctattgactatcaatgtcctgattgtttaatcggcaaaagcaccaaacacagacatatcaaaggttcacgactaaaataccaaaattcatacgaaccctttcaatacctacatactgacatatttggtccagttcacaacctaccaaaaagtgcaccatcctatttcatctcatttactgatgagacaacaaaattccgttgggtttatccattacacgaccgtcgcgaggactctatcctcgatgtttttactacgatactagcttttattaagaaccagtttcaggccagtgtcttggttatacaaatggaccgtggttctgagtatactaacagaactctccataaattccttgaaaaaaatggtataactccatgctatacaaccacagcggattcccgagcacatggagtcgctgaacggctcaaccgtaccttattagatgactgccgtactcaactgcaatgtagtggtttaccgaaccatttatggttctctgcaatcgaattttctactattgtgagaaattcactagcttcacctaaaagcaaaaaatctgcaagacaacatgctggcttggcaggacttgatatcagtactttgttacctttcggtcaacctgttatcgtcaatgatcacaaccctaactccaaaatacatcctcgtggcatcccaggctacgctctacatccgtctcgaaactcttatggatatatcatctatcttccatccttaaagaagacagtagatacaactaactatgttattcttcagggcaaggaatccagattagatcaattcaattacgacgcactcactttcgatgaagacttaaaccgtttaactgcttcatatcaatcgttcattgcgtcaaatgagatccaacaatccgatgatcttaacatagaatctgaccatgacttccaatctgacatcgaactacatcctgagcaaccgagaaatgtcctttcaaaagctgtgagtccaaccgattccacacctccgtcaactcatactgaagattcgaaacgtgtttctaaaaccaatattcgcgcacccagagaagttgaccccaacatatctgaatctaatattcttccatcaaagaagagatctagcaccccccaaatttccaatatcgagagtaccggttcgggtggtatgcataaattaaatgttcctttacttgctcccatgtcccaatctaacacacatgagtcgtcgcacgccagtaaatctaaagatttcagacactcagactcgtacagtgaaaatgagactaatcatacaaacgtaccaatatccagtacgggtggtaccaacaacaaaactgttccgcagataagtgaccaagagactgagaaaaggattatacaccgttcaccttcaatcgatgcttctccaccggaaaataattcatcgcacaatattgttcctatcaaaacgccaactactgtttctgaacagaataccgaggaatctatcatcgctgatctcccactccctgatctacctccagaatctcctaccgaattccctgacccatttaaagaactcccaccgataaattctcatcaaactaattccagtttgggtggtattggtgactctaatgcctatactactatcaacagtaagaaaagatcattagaagataatgaaactgaaattaaggtatcacgagacacatggaatactaagaatatgcgtagtttagaacctccgagatcgaagaaacgaattcacctgattgcagctgtaaaagcagtaaaatcaatcaaaccaatacggacaaccttacgatacgatgaggcaatcacctataataaagatattaaagaaaaagaaaaatatatcgaggcataccacaaagaagtcaatcaactgttgaagatgaaaacttgggacactgacgaatattatgacagaaaagaaatagaccctaaaagagtaataaactcaatgtttatcttcaacaagaaacgtgacggtactcataaagctagatttgttgcaagaggtgatattcagcatcctgacacttacgactcaggcatgcaatccaataccgtacatcactatgcattaatgacatccctgtcacttgcattagacaataactactatattacacaattagacatatcttcggcatatttgtatgcagacatcaaagaagaattatacataagacctccaccacatttaggaatgaatgataagttgatacgtttgaagaaatcactttatggattgaaacaaagtggagcgaactggtacgaaactatcaaatcatacctgataaaacagtgtggtatggaagaagttcgtggatggtcatgcgtatttaagaatagtcaagtaacaatatgtttatttgttgacgacatgattttattcagcaaagacttaaatgcaaataagaaaatcataacaacactcaagaaacaatacgatacaaagataataaatctgggtgaaagtgataacgaaattcagtacgacatacttggcttagaaatcaaatatcaaagaggtaaatacatgaaattaggtatggaaaactcattaactgagaaaatacccaaattaaacgtacctttgaatccaaaaggaagaaaacttagcgctccaggtcaaccaggtctttatatagaccaggatgaactagaaatagatgaagatgaatacaaagagaaggtacatgaaatgcaaaagttgattggtctagcttcatatgttggatataaatttagatttgacttactatactacatcaacacacttgctcaacatatactattcccctctaggcaagttttagacatgacatatgagttgatacaattcatgtgggacactagagataaacaactgatatggcacaaaaacaaacctaccgagccagataataaactagtcgcaataagtgatgcttcgtatggcaaccaaccgtattataaatcacaaattggcaacatatatttacttaatggaaaggtaattggaggaaagtccaccaaggcttcattaacatgtacttcaactacggaagcagaaatacacgcgataagtgaatctgtcccattattaaataatctaagttacctgatacaagaacttaacaagaaaccaattattaaaggcttacttactgatagtagatcaacgatcagtataattaagtctacaaatgaagagaaatttagaaacagattttttggcacaaaggcaatgagacttagagatgaagtatcaggtaataatttatacgtatactacatcgagaccaagaagaacattgctgatgtgatgacaaaacctcttccgataaaaacatttaaactattaactaacaaatggattcattag

SEQ ID NO: 190914 - DNA, 426 bp, Saccharomyces pastorianus
atgctcatcgatcaaatcgtggcagcggtaccaggggtacctgatataagtggcaacgcttcggccctatcgttacagagacgcagtcaagagttcgccacctcatggatatcaatgacatatagtcagagttatggtgacctggcacagaactggcagaatgacgaaggtggagcaggaaattttgattcttatgctgaagagaagttacagaatttcttttcaggtaatagggattggaaatactgctttgctgctgaggacacgaaaaacggtgagccacttgattacgatgacatacctggtgacggtgcaggcacgggttcggcattcaagtctgagatatattttaacacttacggtggtatagataattattgtaatgacgagcatatcggtgctcagaacactggagatggtcgataa

SEQ ID NO: 190915 - DNA, 300 bp, Saccharomyces pastorianus
atggcccatctctcactaaatcagtacaaatgcactcacatcattatgcacggcacttgcctcagcggtttataccctgtgccatttacccataaagcccacgattatccacattttaatatctatatctcattcggcggccccaaatattgtataactgcccttaatacatacgttataccactttttcaccatctactatccactcaatttatatacacttatgtcaatattacaaaaaaatcaccactaaaatcacctaaacataaaaatattctatccttcaacgataatacataa

SEQ ID NO: 190916 - DNA, 576 bp, Saccharomyces pastorianus
atggaatctattatcctcagcattgccatctttattggcgtcctccttggcactagcgttggtactttcagtggtagtggcattagtgctggagttggtgctagcagtggtagtggcattagtgctggagttggtgctagcagtggtagtagcactagtgttggagtcggtactttcggtggtagtagcactagtgttggagtcggtactttcggtggtagtagcactagtgttggagttggtactttcagtggtagtcgcactagtcctgacgttgatgctggcagtggtagtagcactagtcctgacgttggtgctggcagtggtagtagcattagtgctggagttggtactttcagtggtagtcgcactagtcctgacgttgatgctggcagtggtagtagcactagtcctgacgttggtgctggcagtggtagtagcattagtgctggagttggtagtcgcattggtactggcattagcactaccatgaatgcacgtgtcgctgtcctcatcactgctgcaatactttctgcacctgtcactgctattgctctcctggaagctagacggtaa

SEQ ID NO: 190917 - DNA, 5314 bp, Saccharomyces pastorianus
atggaatcccaacaattacatcaaaatccacattctctacatggtagcgcctatgcttcggttacttctaaggaagtcccatcaaatcaagatccgttagccgtttcagcttccaatttaccggaatttgatagagattccactaaggttaattctcaacaagagacaacacctgggacatcagctgttccagagaaccatcatcatgtctctcctcaacctgcttcagtaccacctccacagaatggacagtaccaacagcacggcatgatgaccccaaacaaagctatggcctctaactgggcacattaccaacaaccgtctatgatgacgtgttcacattatcaaacgtcacctgcgtattatcaaccggacccacactatccgttgccacagtatatcccaccactgagtacttcctcacctgatccaatcgattcacagaatcaacactctgaagtacctcaagctgagacaaaggtgagaaataacgtcttaccaccacacactttaacatcagaagaaaacttttctacatgggttaaattttacatcagatttttgaagaactctaatctcggtgacatcattccaaatgaccagggtgaaatcaaaagtcaaatgacttatgaagaacatgcgtatatatacaataccttccaagcatttgccccatttcatttattgccaacatgggtaaaacaaattttagaaattaattatgctgacatccttacagtcctttgtaaaagtgtgtccaaaatgcaaactaacaatcaagaattaaaggattggatagctcttgccaaccttgagtacgacggaagtacatctgctgatacatttgaaattacagtcagtacgatcattcagaggctaaaagaaaacaatatcaatgttagcgacagattggcctgtcaactaatacttaaaggtctatccggtgacttcaaatacctacgtaatcaatatcgtaccaaaacgaacatgaaactttcccaattattcgctgaaattcagttaatatatgacgaaaataaaatcatgaatctaaataaaccgtcccaatacaaacaacacagcgaatacaaaaatgtttctcgcacatctccaaacacgactaacacaaaggttacaactcgtaattatcatagaacaaatagttcaaaaccaagagcagcaaaagctcacaatattgctacatctagtaaattctcaagggtgaacaatgatcacattaatgaatcaaccgtttcatcacaatacttaagcgatgacaacgaacttagtcttaggccagcaacagaaagaatctaagccaacacacacaatagactcgaatgacgaactacctgatcaccttcttattgattcaggagcttcgcaaacgcttgtcagatcagcccattatttacaccatgcaacacccaattctgaaataaacatagtcgatgctcaaaaacaagacattcctataaatgccattggtaatcttcacttcaactttcagaacggcaccaaaacatcaataaaagcactacacacaccaaacatagcctatgatctattaagtttgagtgagctggctaatcaaaatattactgcctgctttaccagaaacactttagaaagatcggatggtacagtactagctcccatagtcaaacatggagacttttactggttatctaaaaaatacctaattccttcgcacatttcaaagctaacaataaacaacgtcaacaaaagcaaaagcgtaaataaatatccatatccgttaatacatcgaatgcttggacatgctaacttccgaagtattcagaagtctcttaagaagaatgcagttacatatttgaaggaatcggatattgaatggtctaacgctagcacatatcaatgtcctgactgtctaatcggcaaaagcacgaaacatagacatgtcaaaggatcacgactaaagtaccaagaatcatatgagccttttcagtacttgcacaccgatatatttggtcctgtacatcacttaccgaaaagtgcaccttcttactttatatcgtttacagatgagaaaaccagattccaatgggtgtacccattacacgaccgtcgtgaagaatctatcctcaatgtttttacatcgatattagcatttattaagaaccaattcaatgctcgcgttctagttatccagatggatcgtggctccgagtacactaacaaaactcttcataagttctttacgaacagaggtattactgcatgctatacaaccacggcagattctagagcacacggtgtcgctgaacgattaaatcgtactttattaaacgattgtcgcacactgcttcattgcagtggtctaccaaatcatctatggttctcagcagtcgaattttctactataatcagaaattcattagtctcaccaaaaaacgataaatctgcaagacaacatgcaggtttagctggactggacattactactatactacctttcggtcaaccggttatagttaacaaccataatcccgactcgaaaatacatcctcgtggcattccaggttacgccttacatccgtcacgaaactcttatggctatattatctatcttccatcattaaaaaagacagtagatactaccaattacgttatattacaagacaagcaatccaaattggaccaattcaattatgatacactcacctttgatgatgatctcaatcgtttaacagcccataaccaatcttttattgaacaaaatgaaacggagcagtcatatgatcaaaatacagaatctgatcatgactatcaatcggagattgaaataaactctgatcctctagtgaacgacttctcgtcccaatcaataaaccctttacaattagacaaggaaccagtccaaaaagtacgtgcaccaaaagaagttgatgccgacatatctgaatacaatattcttccatctactatacgatctcgtacaccccatatcattaataaagagagtaccgaaatgggtggtaccgttgaatcagatactacttcacctagacactcgtctaccttcactgcacgaaaccaaaaccgacctggtagtaccaatgagatgattgatttgacctcacaggatagagttaattatggacttgaaaacatcaaaactacacgtttgggtggtacggaggaaccatatattcaacgaaatagtgatacaaatatcaaatacaggactacaaatagtacgccctcaatagatgaccgttcgtccaacagtgaatccactactcccatcatctccatagaaacaaaggctgtatgtgataatacaccctccattgatacggatccgccagaatatcgatcttctgaccatgcgactcctaatataatgcctgacaaatcctcaaaaaatgttacggctgattctattcttgacgacctcccacttcctgacttaacccataaatctcctacggacacttctgatgtttcaaaagatattccacacatacactctcgtcagactaattccagtttgggtggtatggatgattctaatgttctgactactaccaaaagtaagaaaagatcattagaagataatgaaactgaaattgaggtatcccgagacacatggaataataagaatatgagaagtctggaaccaccaagatcgaagaaacgcataaatttaattgcagcaataaaaggagtgaaatcgatcaaaccagttcgaacgaccttaagatatgatgaagcaattacatataataaagacaacaaagaaaaagacagatatgttgaagcttatcataaagaaattagccaactattgaaaatgaacacttgggatacaaacaaatattatgatagaaatgacatagatcctaaaaaagtaataaactcaatgtttatatttaacaagaaacgtgatggtacacacaaagctagatttgttgcaagaggcgacattcaacaccccgatacatatgattctgatatgcaatccaataccgtacatcactatgcactgatgacgtcactgtcaatcgcattagacaacgactattatatcacacagctggacatatcctctgcttacttatatgctgatatcaaagaagaattatacataagacctccaccacatttaggtttgaatgataaattactacgtttgagaaaatcactctatggtttgaaacaaagtggtgcaaactggtatgaaaccattaaatcatatttaataaattgttgcgacatgcaagaagttcgcggatggtcatgcgtatttaagaatagtcaagtaacaatttgcttattcgttgatgatatgatattattcagcaaagacttaaatgcaaataagaaaatcataacaacactcaagaaacaatacgatacaaagataataaatctgggtgaaagtgataacgaaattcagtacgacatacttggattagagatcaaatatcaaagaagcaagtacatgaaattaggtatggaaaaatccttgacagaaaaattacccaaactaaacgtacctttgaacccaaaaggaaagaaacttagagctccaggtcaaccaggtcattatatagaccaggatgaactagaaatagatgaagatgaatacaaagagaaagtacatgaaatgcaaaagttgattggtctagcttcatatgttggatataaatttagatttgacttactatactacatcaacacacttgctcaacatatactattcccctctaggcaagttttagacatgacatatgagttaatacaattcatgtgggacactagagataaacaattaatatggcacaaaaacaaacctaccaagccagataataaactagtcgcaataagcgatgcttcatatggtaaccaaccatattacaagtcacaaattggtaacattttcctactcaacggaaaagtgattggaggaaagtcgacaaaggcttcgttaacatgcacttcaactacagaagcagaaatacacgcagtcagtgaagctattccgctattgaataacctcagtcaccttgtgcaagaacttaacaagaaaccaattattaaaggcttacttactgatagtagatcaacgatcagtataattaagtctacaaatgaagagaaatttagaaacagattttttggcacaaaggcaatgagacttagagatgaagtatcaggtaataatttatacgtatactacatcgagaccaagaagaacattgctgatgtgatgacaaaacctcttccgataaaaacatttaaactattaactaacaaatggattcattag

SEQ ID NO: 190918 - DNA, 330 bp, Saccharomyces pastorianus
atgtctgacgcaggtagaaaaggattcggtgaaaaagcttctgaagctttgaagccagactctcaaaagtcatacgctgaacaaggtaaggaatacatcactgacaaggccgacaaggtcgctggtaaggttcaaccagaagacaacaagggtgtcttccaaggtgtccacgactctgccgaaaaaggcaaggataacgctgaaggtcaaggtgaatctttggcagaccaagctagagattacatgggagccgccaagtccaagttgaacgatgccgtcgaatatgtttccggtcgtgtccacggtgaagaagacccaaccaagaagtaa

SEQ ID NO: 190919 - DNA, 354 bp, Saccharomyces pastorianus
atgatagttgaactttattcaaatatcatcgaagtaagaagatatactactaaagactccctttgctctatattcgagtcaggctccaccagtcatttcgaaattaaccagttacaggtcaaaagactaaacttactgcaaaaccaatttgcttctgttttcacttctttccaccccaaagataatacaaagggcatacatatcaattttttttcacctgtcactaggataactgaccttcaatattcctttttttatacgaatcagatactgttcggtacacgatatctaattaaaatgattcaaaactttgtaacaggtaaagttttcactagaaccaatcaatccaagtga

SEQ ID NO: 190920 - DNA, 369 bp, Saccharomyces pastorianus
atggtcaaattaacttcaatcgccgctggtgtcgccgccattgccgctggtgcctccgctgcagcaaccactacactatctcaatctgacgaaagagttaatttggttgaattaggtgtctatgtttccgatatcagagctcatttggctgaatactactccttccaagctgcccacccaactgaaacttatccagttgaaattgcagaagctgttttcaactacggtgatttcaccaccatgttgactggtattcccgccgaccaagttaccagagttatcactggtgttccatggtactctagcagattaaagccagctatctctagcgctctatccgcagacggtatctacactattgcaaattag

SEQ ID NO: 190921 - DNA, 1158 bp, Saccharomyces pastorianus
atgactaaatctgtagatacgctgctgatcccaggccccattatcctaagcggagcagtccagaaggccctggacgttccctctttgggccacacctctcctgagttcgtctctatttttcaaagggtgctaaagaacacaagagctgtcttcaaatccgctgctgcctcgaagtctcagccttttgtgcttgccggctctggtacgttggggtgggacatatttgcctcgaactttattctttcgaaggcccccaacaagaacgtgctggtcgtatccactgggacattttctgacaggtttgctgactgtctgcgtagctacggtgcgcaagtagatgttgttaggcccctcaagataggcgaatcagttcccttagaactgattactgaaaagttgtcgcaaaatagctatggggctgtcacggttacgcacgttgacacttcaacggcagtgctgtccgatctgaaagccatttcgcaagcgattaagcagacttcgccggaaacgttcttcgtagtcgatgctgtatgctcgattggatgcgaagagtttgaatttgatgaatggggggtggatttcgccttgactgcttcgcaaaaggctattggcgctccagcgggtctttctatctcgctatgcagtagcagattcatggattatgcactcaacgacagcaaaaatggtcatgtacatgggtatttttcctcgttgagaagatggacaccaataatggaaaattatgaggctggtaaaggagcttattttgcaaccccacccgtacaactaattaatagccttgatgtagccttgaaagaaattctcgaagaggggttgcataagagatgggatttgcaccgtgaaatgagtgattggtttaaagacagtttggttaatggcttgcaattgacatccgtcagtaggtatccttctaacatgtctgcgcacgggttgacagccgtatacgtagcagatcctcctgatgtcattgcttttttaaagtcacacggtgtagtcattgccggaggtattcacaaggacatcggacccaagtatatccgtattggacatatgggtgtgaccgcttgcaacaagaatttaccgtacatgaagaactgcttcgacttaataaaactagctcttcagaggaaaaagtga

SEQ ID NO: 190922 - DNA, 969 bp, Saccharomyces pastorianus
atggaaatgactgattttgaactaactagtaattcgcaatcgaacttggctatccctaccaacttcaagtcgactctgcctccaaggaaaagagccaagacaaaagaggaaaaggaacagcgaaggatcgagcgtattttgagaaacagaagagctgctcaccagagcagagagaaaaaaagactacatctgcagtatctcgagagaaaatgttctcttttggaaaatttactgaacagcgtcaaccttgaaaaactggctgaccacgaagacgcgttgacttgcagccacgacgcttttgttgcttctcttgacgagtacagggatttccagagcacgaggggcgcttcactggacaccagggccagttcgcactcgtcgtctgatacgttcacaccttcacctctgaactgtacaatggagcctgcgactttgtcgcccaagagtatgcgcgattccgcgtcggaccaagagacttcatgggagctgcagatgtttaagacggaaaatgtaccagagtcgacgacgctacctgccgtagacaacaacaatttgtttgatgcggtggcctcgccgttggcagacccactctgcgacgatatagcgggaaacagtctaccctttgacaattcaattgatcttgacaattggcgtaatccagccgtgattacgatgaccaggaaactacagtgaacaagaacactagccccagcttttgctttctgctttttttctttttttttttttttagtcgtggttctctgatgggggaggagccggttaaagtaccttcaaaagcagaatgcagggttattggaagctttctttttttcttttatgctagtttttcctgaacaaatagagccattcttttcttattactaagaaatggacggcttgcttgtactgtccgaagcgcagtcaggtttgaattcatttgaattgaatgatttcttcatcacttcatga

SEQ ID NO: 190923 - DNA, 483 bp, Saccharomyces pastorianus
atgtctataccccattccgtattttcggcactcttggtcttcgtggcgctagctactacaaccttagccagtacagaagcttgcttaccaacaaacaaaagggaagatggtatgaatattaatttttatgagtacacaataggcgaccaaaccacatacttggagcctgaatatatgggctatgaatactccaatacaaagaagttaggttccgttagcggacagaccaatctctccatatactatagtccgccttgtgagagcactcctacctgtgtgacttatgcagttttgaagcgtgatgaggatggatatgatccttgcggacctctttatgaaactaaaaaacgtgacactgaatactgtgacccaaatactgcctattggagttctgatctttttggtttctatactactccaactaatgtaactgtggaaatgacagggtacttaatatggagtatgggcaaccgacgccgttga

SEQ ID NO: 190924 - DNA, 1398 bp, Saccharomyces pastorianus
atggcccgcaatagacaagcgtgcgactgttgttgcattcgtcgagtaaagtgtgatcgtaaaaaaccatgtaaatgttgtcttcaacacaatctgcaatgtacatatcttcgacctttgaagaaaagaggtccaaaacccgtcaaggtgagaaatttaaagaaagtagatgatgtacaggtatttagtaaaagtagtagtggtggcataatgaaggttccaaaggcactaattgatcagtgtctgcggctctataatgataagttgtatgtgatctggcctttgctgtgttatgatgatctttacgaacttttagagaaaagatatgacgaaacctgtgtgtattggttcctggtatctctttctgccgccacgcttagcgatttgcagactgaaattgagtcggaaggaggggttacctttactgggatacagttatccagtttctgcatgtcatcacgccaagaatttgacgattttaacggtagtgatatattcaagattatgacgtactattgtctaaaccgctgctacgcacagatgtccaactcaagaacttcgtatcggctttcttgtgaagccgtggggctcattaagttggcggggttccatcgcgaggaaactttgaaacttcttcctttcgatgagcagcagcttggaaggaaagtttattatttgcttctcttaacggaaagatacttttctgtgtatacgcattgcgccacgagcctggataccacgattgctccaccacaaccggagaacgtaacggacccccgactatctctcgacagcttcttggagatgattagggtatttactgtaccgggaaaatgcttctttgatgctctagctaccgactctgctaatgtaacctgtactgaagactcccttaaaaagatatggagggaacttcatacggtgccacttgagatagaaccatggtcttacggctatgtagacatatctttttcacggcattggattagaacacttgcttggaagctagtgcttcaaataagcggtatgcgaatcagtttcctttcaaatagcaagaatacgcatattccagtagaaattgctagagacatgttagaagacacatttttaatcccaaaaaatctttatgcagttcacggtccagggatatcagtgaaagcactagaaatagccgacgcattggtagatgttgtgaatcagtacgatcaaaatgcagagtcggaggcttggaattttttgttcgatatatccaaatttgtcttctctcttaagcattgtgatagcacattagttgataagtttacgacaaagtgtcagtgtgcgcttatcacgcttcctctttctaatccgcttgaatcgacagatggttctaaagaagatgtagatgcgcttccttaa

SEQ ID NO: 190925 - DNA, 1776 bp, Saccharomyces pastorianus
atgtctcacaaacaattcaaatcagatggaaacatcgttactccctacctacttggccttgctcgaagcaatcccggccttacagtgattaagcacgacagagtggttttccggactgcgtcagctcctaattcagggaaccctcctaaagtttcattggtttctggaggtggcagtggtcatgagccaacgcatgccggttttgttggtgaaggtgccttagatgcgattgcagcaggtgccatttttgcttctccttcaactaaacagatctattctgctattaaagctgttgaatctcctaagggtaccttgatcattgtaaaaaattacaccggtgatattatacattttggtctcgctgctgaaagagctaaagctgctggaatgaaagtcgaactggttgctgtaggagatgatgtctctgtcggtaagaagaaaggttctttagtcgggcgtcgaggtctcggagccaccgtattggtgcataaaattgctggggcagccgcttctcatggactggagttggcagaagttgccgaagttgctcagtcagtagttgacaatagtgtcacaattgcggcatctcttgatcactgcacggttcctggccacaaacctgaagccattttgggcgagaatgagtatgaaatcggtatgggtattcataacgagtctggtacctataagtcttctccgctgccatcgatttctgagctcgtttcccagatgcttcctcttcttctcgatgaggatgaagaccgttcttatgtgaagtttgagcccaaagaggacgtagttcttatggttaacaacatgggtggtatgtctaatctagaattgggttatgctgcagaggtcatttctgaacaattgattgataagtatcaaattgtgcccaagagaacgattactggagcattcattactgcattgaatggtcctgggtttggtatcactcttatgaacgcttcaaaagctggtggcgatatccttaagtatttcgattatcctaccacagcgagtggatggaatcaaatgtaccattctgccaaagattgggaggtacttgccaaagggcaggttcccaccgccccctctttaaagacattgaggaatgaaaaaggttcgggtgtgaaagctgattatgacacttttgctaaaattttgcttgctgggattgcaaaaattaacgaggttgaaccaaaggttacttggtacgataccattgcaggagatggtgattgcggaactactcttgtgtccggtggtgaagcattggaagaagctattaaaaaccatacgttgcgcctcgaggatgctgctcttggtatcgaagatattgcgtatatggttgaggattctatgggtggtacgtccggtggtctgtactctatctatctttctgctctcgcacaaggagttagggattctggggacaaggaacttactgcggaaactttcaaaaaggcatcaaacgttgcactagatgctttgtataagtatacgagagcccgtcctggttacaggactctgatcgatgctctgcaaccttttgtcgaagcgctgaaagccgggaagggtcccagagccgccgcccaagctgcttatgatggtgccgaaaagacaaggaagatggatgcccttgttgggcgtgcttcttacgtggctaaggaggagctgagaaaactcgacagcgaaggtggattaccagatccaggagcagttggtcttgctgcactactcgatggatttgttacagctgctgggtactag

SEQ ID NO: 190926 - DNA, 1941 bp, Saccharomyces pastorianus
atgagttacgaatctgggaggtcatcctcctcttccgagagtacacggccaccaacgctaaaagaagaacctaatggtaaaatagcttgggaagaaagtgtcaaaaaatctagggaaaataacgaaaatgacagcactctcttgaggcgaaagctaggtgagactcgaaaagcaattgaaactggaggatcatcgagaaataaactttctgctttgacacccttgaaaaaagtggttgacgagaggaaggattcggtacaaccacaggtcccttccatgggttttacttattctttgcctaatttgaagactttaaacagtttttcagatgctgagcaagcacgtataatgcaagattatctatccaggggggtaaatcaaggcaacagtaataattatgtagacccactatatcggcaattaaatccaactatgggtagtagcaggaacaggcctgtttggagtttaaatcagccgttaccgcatgtattggatcgaggcttggcagcaaagatgatacaaaagaatatggatgcaaggtcccgcgcatcatcgagacgagggtcgaccgatatttcaagggggggttctactacgtcagtgaaagactggaaaaggctccttagaggtgcagcaccgggtaaaaagcttggtgacatcgaagctcaaacgcaacgcgataatactgttggtgcagatgtgaaacctactaagttagagcctgaaaacccacaaaagccctctaacacgcatattgagaatgtttcacgtaagaaaaagcgtacttcgcataatgtcaatttttcattaggcgatgaaagctacgcatcctccatagccgatgcagaatccagaaaattaaagaacatgcaaaccctcgatggttctactccggtttatacgaagcttcctgaagaacttattgaagaggaaaataaaagtacgagtgcattagatggtaatgaaattggtgcctcagaagatgaagacgcggatataatgacatttcctaacttttgggcaaaaattcgctatcatatgcgagaaccgtttgcggagtttctcgggacactagttcttgtcatttttggtgttggtggtaatcttcaagcaactgtaacaaaaggtagtggtggttcctatgaatccctatcatttgcatgggggttcggttgtatgcttggtgtttacgtcgcaggcggtattagtggtggtcatattaaccctgctgttacgatttcaatggcaatttttcgaaaattcccctggaaaaaggtgcccgtatatattgttgctcagattatcggtgcatattttggaggagctatggcttatggttatttttggagctctatcacagaatttgagggaggtccgcacataagaacaacggcgaccggtgcgtgtttgtttactgatccaaagtcttacgtcacgtggagaaatgccttctttgacgaattcataggagcctctatacttgtgggttgtttgatggcgctattggatgatagtaatgctccacctggcaatggtatgaccgcattaattattggattcttagtcgctgcaattggtatggcccttggatatcaaacaagtttcacaatcaatcctgcaagagatctcggtcctcgcatatttgcttccatgattggctatggtccacatgcttttcatctcacacattggtggtggacatggggagcctggggtggtccaattgccggcggtattgctggagcactcatatatgacattttcatttttactggatgcgaatccccagtcaactacccagacaacggttatattgagaatagggtaggtaaacttttacatgcggagttccaccagaatgatggcactgtctcagatgaatctggtgttaacagcaacagcaacactggcagcaagaaatctgtgcctacttcgtcataa

SEQ ID NO: 190927 - DNA, 1677 bp, Saccharomyces pastorianus
atggcagtccttaacttgaaacgtgaaactgtcgacattgaagagacagcgaagaaagatatcaaaccttattttgcttcgaatgttgaagcggttgatattgatgaagatcccgatgtttcaagatacgatccccagacaggagtgaaaagggcgctcaaaaataggcatatctcattgctagctttgggtggtgttattggcccaggttgtcttgttggtgcaggaaacgcactcaacaaaggtgggccacttgctttacttttaggctttagtattattgggatcattgctttctcagtgatggaatctataggtgaaatgatcactttatatccctcgggcggtggatttaccactttggctcgaagatttcatagcgatgcactgcctgcagtttgcggttatgcttacgttgttgtgttcttcgcagttttggcaaatgagtacaacactctctcctccatactacagttttggggcccacaagtccctctatatggttacatcttgatattctggtttgcatttgaaatttttcaactagttggcgttggtctttttggtgaaacggagtactggcttgcttggttgaaaatagtaggattagtagcctattatattttctcgattgtttacatatctggggatattaggaatagaccagctttcggctttcattattggaatagtccaggtgcattatcacatgggtttaagggaattgcgatagtgtttgtgttttgttcgaccttctattctggaacggaatcagttgccttggctgcaacggaatcaaaaaaccctgggaaggctgtgccacttgctgttcgacaaactctgtggagaattttagttgtttatattggaattgctgttttctatggagcaactgttccgtttgacgacccaaacctctctgcttctaccaaagtcctaaaatctcccattgctatcgccatatctcgtgctggttgggccggcggagctcatctggttaatgccttcattttgataacttgcatctccgccattaatgggtcactttatatagggagcagaaccttgacgcatttagcacatgaaggcctagctccaaaaattctggcttggaccgatcgaagaggcgttcccatccccgccatcactgttttcaacgccttgggcctaatatcattgatgaatgtgagcgttggagctgcaaatgcgtactcttatatcgttaatctttctggtgttggcgtctttattgtctggggtgtaataagttatacgcacctgagaataaggaaggcgtgggttgctcaaggaagatccatagaagagctaccttatgaagcgctattttatccgtggacgccagtacttagtctggccgctaacatttttctagcactcatccaaggatggagctatttcgtaccttttgatgcgggcaattttgttgatgcttatatccttctgcctgttggaattttattgtatattggcatatgtgtttttaagagcaatcattttagaactgttgatttgcggtcaatcaacctagacgaaggacgaagaaaagacatggaggctgatctttctgatcaagagagtagcttagcatcttcggaaacgatgaaggattataaaagtgcaacttttttcagatacctcagcaacattttcacctga

SEQ ID NO: 190928 - DNA, 639 bp, Saccharomyces pastorianus
atggctgatttatttgctcctgctcctgaaccatctacagagttaggacgtctcagagttctttctaaaagtgctggtattagagtttcccctctcattttgggaggaatgtcaattggcgacgcttggtctgaaatcctaggatcaatgagcaaggagcgagcttttgagttgctcgatgctttttatgaggcaggtggaaatttcattgatactgcaaataattatcaaaacgaacagtcagaagcttggatcggtgaatggatggtttcaagaaaattacgcgaccagattgtaatcgccaccaagtttaccactgactataagaaatacgacgttggtggtggtaaaagcgcaaactactgtggcaatcacaagcgtagtttgcatgtgagtgtgagggattctctccgcaaattgcaaactgattggattgatatactttacgttcactggtgggattatatgagttctatcgaagaagttatggatagtttacacattctagtgcagcaggcaaggtcctctatttgggtgtgtctgatacgcctgcctgggttgtttctgcggcaaattactacgctaaatctcatggtaaaaccccttttagcatctatcaaggtaaatggaacctgttga

SEQ ID NO: 190929 - DNA, 459 bp, Saccharomyces pastorianus
atggctaggcatttcggtatggccctcgccccatgggatgtcatgggaggtggaagatttcagagtaaaaaagcaatggaggaacggaggaagaatggagagggtattcgttctttcgttggcgcctctgaacaaacagatgcagaaatcaagattagtgaagcattggccaaggttgctgaggaacatggcactgaatctgttactgctattgctattgcctatgttcgctctaaggcgaaaaatgtttttccattggttggaggaaggaaaattgaacacctcaaacagaacattgaggctttgagcattaaattaacaccagaacaaataaagtacttagaaagtattattccttttgatgttggttttcctactaattttatcggtgatgatccggctgttaccaagaaggcttcacttctcacggcaatgtctgcgcagatttccttcgattaa

SEQ ID NO: 190930 - DNA, 678 bp, Saccharomyces pastorianus
atgtcacagtacggatttgtaagagttcctagagaggtagaaaaggccattccagtggtgaatgcacctagaccacgggccgttgttccgcctccaaacagtgaaactgctaggcttgttcgggaatatgccgctaaagaattgactgcccccgttctaaaccactctttgcgtgtttttcaatatagtgtagctatcataagagaccaatttccagcatgggacttggatcaggaagttttgtacgtcacctgcttacttcatgatattgcaacaacagataagaatatgagagccacgaagatgtcatttgagtattatggtggcatactttcaagggagcttgtatttaatgcgacaggtggaaatcaggactatgcagatgcagtaactgaggccatcattcgtcaccaggatttgactgggactggctacattaccaccttggggctcattctgcagattgctactacgcttgacaatgtcggatccaataccgatctgattcatatcgatacagttagtgccattaacgagcaatttccaagactgcactggttatcatgttttgctacggtggtggacactgaaaactcgagaaaaccgtggggccacaccagttctttgggtgatgatttttcaaagaaagtcatatgcaatacatttgggtataactaa

SEQ ID NO: 190931 - DNA, 456 bp, Saccharomyces pastorianus
atgatcgtaaacaatgcacacatacttaccctgccaataccctaccatgccccatctgtcatactcaccatcacttgtatactgatacggcatacgcacacggatgctacaatagtatatactatctcaacttaccctactttcacattccactccatggcccatctctcacttcatgagtacaaatgcacccacatcattatgcacggcacttgcctcagcggtctataccctgtgccatttacgcataactcccactattatccacattttaatatttatatcttattccgcggccccaaatattgtataaatgcccttaatacatacgttatacctctttttcaccgtatactaaccactcaatttatatacacttatgccaatattacaaaaaaatcaccactaaaatcacctaaacataaaaatattctatccttcaacaataatacataa

SEQ ID NO: 190932 - DNA, 309 bp, Saccharomyces pastorianus
atgcgtactttcactgactttgtttctggcgcacctattgtaaggagtcttcagaaaagcaccataaggaaatatgggtacaatttggcaccccacatgtttttgttactacacgtagatgagctatcgattttttctgcataccaagcaagtttacctggcgaaaagaaagtcgacacagagcggctgaagcgtgatctatgcccacgtaaacccattgagataaagtacttttcacagatatgtaacgatatgatgaacaaaaaggaccgattgggtgatgttttgcgtgtgtgctgcccaagttga

SEQ ID NO: 190933 - DNA, 1179 bp, Saccharomyces pastorianus
atggcagacacaccctctgtggcagtacaggccccaccgggctatggtaagacggagttatttcatctccccttgatagcactggcgtctaagggcgacgtgaaatatgtgtcgtttctgtttgtaccgtacacagtgttgcttgctaattgcatgatcaggttgggccgacgcggttgcttgaatgtggcccctgtaagaaactttattgaagaaggttacgatggcgttactgatttatacgtggggatctacgatgatcttgctagcactaatttcacagacaggatagctgcgtgggagaatattgttgagtgcacctttaggaccaacaacgtaaaattgggttacctcattgtagatgagtttcacaactttgaaacggaggtctaccggcagtcgcaatttgggggcataactaaccttgattttgacgcttttgagaaagcaatctttttgagcggcacagcccctgaggctgtagctgatgctgcgttgcagcgtattgggcttacgggactggccaagaagtcgatggacatcaacgagctcaaacggtcggaagatctcagcagaggtctatccagctatccaacacggatgtttaatctaatcaaggagaaatccgaggtgcctttagggcatgttcataaaatttggaagaaagtggaatcacagcccgaagaagcactgaagcttcttttagccctctttgaaattgaaccagagtcgaaggccattgtagttgcaagcacaaccaacgaagtggaagaattggcctgctcttggagaaagtattttagggtggtatggatacacgggaagctgggtgctgcagaaaaggtgtctcgcacaaaggagtttgtcactgacggtagcatgcaagttctcatcggaacgaaattagtgactgaaggaattgacattaagcaattgatgatggtgatcatgcttgataatagacttaatattattgagctcattcaaggtgtagggagactaagagatgggggcctctgttatctattatctagaaaaaacagttgggcggcaaggaatcgtaagggtgaattaccaccaattaaggaaggctgtataaccgaacaggtacgcgagttctatggacttgaatcaaagaaaggaaaaaagggccagcatgttggatgctgtgtctgctga

SEQ ID NO: 190934 - DNA, 528 bp, Saccharomyces pastorianus
atggaatctattatcctcagcattgccatctttattggcgtcctccttggcactagcgttggtgctggcagtggtagtagcattagtcctgacgttgatgctggcagtggtagtcgcactagtcctgacgttgatgctggcagtggtagtcgcattagtgctggagttggtactttcagtggtagtagcactagtcctgacgttgatgctggcagtggtagtagcactagtcctgacgttggtgctggcagtggtagtagcattagtgctggagttggtagtcgcattggtactggcattggtagtcgcattggtactggcattggtactggcattggtagtcgcattagtactagcattggtagtcgcattagtcctgacgttggtactagcagtggtaatcgcattagtactggcgttagtactggcattagcactaccatgaatgcacgtgtcgctgtcctcatcactgctgcaatactttctgcacctgtcactgctattgctctcctggaagctagacggtaa

SEQ ID NO: 190935 - DNA, 87 bp, Saccharomyces pastorianus
atgctccccagaaagtacaagcccgcctacaaaaaacaggcacatcgtgtgaagagtaatccacaaccagcttatactttccaatga

SEQ ID NO: 190936 - DNA, 1629 bp, Saccharomyces pastorianus
atgatttcacccataagctttctatcatcgctgctatgcttaacttatctaacctcagctttaccgattcttcctaagagagaagttgtaacgagagttcacacagcaagcacaactaatgttgtgactgatttttactccactactaccgaagttgttattgccccaactgtcgaattcctaataagcgatagtgttacctttacaacaaccttaattccacaaggtgtgaacccaacagctgaaccaactacgactatcactaaagttctcttaaaaaaggctgaaatgagtacatcttcgcagccaacctctactttgcagccaagcactattccacaatcaacctcctcttttcaagcagaatctactttgcaagccgtctctacgcaacaaactgctatgtctgtttctgcaggtactagtgaggatgtgcaacaattagctactacttctacctctatctcctcctctccttcccctaccactacgtctacttccacacaaaatatcgtgagtggtgtcggtgaagccaatgttgaaggcaacactcaaagtcagcatcattcttaccaagcagctgcgacttcaactttgaatcaacaaacgagtacctcaattgcttctcaggagtccaccgaatcaaccaatacacctacgtcgtcctctacgtcgtcctctacttcttcttctacttcttcttctacttcttcctctacttcttcttctacttcttcctctacttcgtcctctacttcgtcctctacttcatccacacaggaaacagccgctaccacctctgaaggttcctctagtagcagcgctgctataacttcttctccaaaggctattgcatattcaccatataatgatgatggctcttgtaagtctgcagacgctgtctcttctgacttaacgttgatcaaatctaaaggtatttccaaaatccgtgtttatggcaccgactgtaattcctttgaaaccgtccaaccagcagccgtaaaactaggtattaagattaaccaaggtttgtatatcaccagtagcggcgttgattccatagatgattctgttaccacattgattcaatatggtcaaactaacggttgggatgtctttgatttcattactgttggaaatgaagctatcaataatggttggtgttcagtttctgatttgattagtaaaatttcctctgtcaaatccaaattaagcgaagctggctattctggccaaattactaccagtgagccccctgtctcatttgaaaataaccctgatttgtgcaaaaaatctgatattgacttcgttggtatcaacccacatgcctactttgatactagcgccagtgctgaaactgccggtacatttgttaagggtcaagttgaattaattcaaggtgtttgtggtacttctaatgttttcgtcacggaaacaggttacccatcgtctggtattcaaaatggaggcaacattccatccactgctaaccaaattactgcagtccaaaacatcttgaatgaaatggacttggatgttacaatcttatcgacttacaatgattactggaaggctcccggtgattacggtatcgaacaatctttcggtgtgattgaatattttccataa

SEQ ID NO: 190937 - DNA, 315 bp, Saccharomyces pastorianus
atgccagatttttccaattccaatttaaattccttcatagcgtgtctcagatctctgtccattaagatcttaatcatttgccatggtttcatcgtattttcttcattggcagaagtcccatctagattaaccaattttttttcgatcatgatattgctaaccttttctaacttttcccagaacattaggcctcgaatttatttgatccatgagtttctgcacctttatgtgtgcatctattttgtcattaggctgtctgtcgtcccaagattgagcgtaaaatcttctcggagaaatccaggaaagcctccttaa

SEQ ID NO: 190938 - DNA, 306 bp, Saccharomyces pastorianus
atgcagttgccccaaaaacaccacggaacctcatctgttctcgtactttgttgtgacaaagtagctcactgccttattaccacattttcattatacatcacttcgcaaaatgcaatattgaaaatgcctctagagatgaaaaacaatcgtgaaaagggtcctgcgttattaaaacatttgatcagtatgcaatggcacagagacaatcaggaatactatagtcatagacgatacaaggtatatattggtcatgcagacccctctagaaagtaccgacgtcaagttagatacactcaacgaacctag

SEQ ID NO: 190939 - DNA, 231 bp, Saccharomyces pastorianus
atggcagagacagtactaatgaatatcctacgtggtgacgtagcaagattggaaaaatcgactgcgattatcacacaaagtagcggctctcccatcaagagatcaaaaccatttaaatattcttaccaaaaggaaattgtcctgtatgcgcactacatgaagctggattatttttcactgagtgtacctatgccccagaagcgtttaggggcactgcgagagaatacatga

SEQ ID NO: 190940 - DNA, 498 bp, Saccharomyces pastorianus
atgcaattgttttccatcctctctttgttgtcatcattgatgtgttcattgaccgttttagggtcttccgcaagttcctatgttaagtttcctgttcaaaagtttgctgatattataaatataggcacacaggatgtttctaccgtcttcaaaagaaatgaggttcttaacaccacagtgataaatggaataggagtgtatgttgtcaagatggaaatcggaacgcctccacaaacggtgtacctacagttagatactggctcttcagatatgattgtgaataatgctgacattgcctattgcaaatcgatgtctgacggatctgactacgcttcaactgataattacgaactcacggcaacattcactgggcctcgttctactaccacctcaccagagcttataacactgtccgctcttataggggtaaattcaatgcaagaaactcatctacttttaagaataacgcgactttcttcaatgacatatacgtattag

SEQ ID NO: 190941 - DNA, 528 bp, Saccharomyces pastorianus
atgcgtaataatgtgactgaattggtcaacagtataataggtgttcaaacacctggatcgctaccagatactctttctggggcacattcattgcagagacgcataagctattttgacgtcaattggatatcatggaattgggacaatgtaaatgttgatcttaataaagaggtaaaaaaaagtaggcccctccttggggaggaggacgatcaatgcatgttcggttggttcgcaaataatccagggtggaaatattactggtcggtaactgataatcctgatccaggatataaagagaattactctgacattggagatgaaaatgctgtccacggtgaattatattttaacacatatggggggttgatggcttctgtaatgacaacaaagatggtgctcaatgcgaagagacagcttgtggttattgatacaattgtggtaaaggccatctgcgattatgttatgaaatattggaaaaaaaaggttaaccttactacgatatcattatatttgatgttaaagttataa

SEQ ID NO: 190942 - DNA, 1143 bp, Saccharomyces pastorianus
atggatggagccaaatttgaaaatactgtagcttttttaccatctgaaatatttgattgctacaattccacgctacccaagaatgtattccgaagttttgttacctggtcctgctatgagaaattcaattccttagaattccgcacttggctattaatgtggttaccactcattattgcgtggaaaatacgtggtaaaagacactatctcgttatcgttactgctcttatgtttgaagtgctgtatttcttatggacatattcgtacatattccgagaacgcaccttaggaaagcaagtttctcaatttgctaaagagatcattacaaatactccgggtatagacactgaagactgggaacgtgttgcagtaaatttcaattcttatttatatgaaaataaactttggaatactgagtactttttttttgatggttccagctgccaagaagcgttcagaaagatgcttcttgagccattttccttgaaaaaaaatgactttgctaatgccaaggtacctgacggatctgtttgttacactgaaaaagctttgcaggtttattttacacagatagagagaaaatggcactggattaattctgaaggatttttacacaataaaaccacacagagtgttcaattttcgaaacatggttacggttccaaacttctctgggctttcaaggaagtgacaataatgaattcacgctttgcgttcttcagtattgcttacttaaacggtctccttactataccaagactaagaaattcactgcatatcctctatgtatgtgcagttctttcatctatgataattgaatatttaatagggatcgacaaattcaggttcaaatcaatgaatctgatacataaactacagttcttgtcatatattacatgtggacacgagaagtctgatgcaactaattggtctcaaattgcgaagaggacgaatacttacatgtttgagcagaaaatttggaattcgccaatactgttctcagatggtattgattgtgaaaagttttttaaatggtatttcagtacccctgtatcttcgcaagcgtctttgtcagttggttccactgattttgaactctggccatatataaaagaagcacaatcagcttgcaatgatgtgtaa

SEQ ID NO: 190943 - DNA, 744 bp, Saccharomyces pastorianus
atgttaaattattgtaaaacaatgtgtatgatgaggaggaatgtacctaagccaaaaaaaaaaaaaaaaaaaaaaaaaaaaaaagaaacagcttttgcatattcaatccaggcatagggcgactatttagcactcaacgatttttaagcttgtgtattgctgacataaattccggctttagaatccaatattgaaaaacgtgagtacgcagaggagatagaagaaaagtaggaagttaccgtttatattgatttgtgaaatgcatactccgttggatgtggggcaacatagatttaagtgtggatgaaaattatgtgctcattgtgaaaaaaaagttttgcttttactaacaaatttttttattatttgttttcaatagacgtttcctctgacagaagaaaggccagaaaggcttatttcactgctccatcctctgaacgtcgtgttttgttatctgctccattatccaaggaattgagagctcaatatggtatcaaggctttgccaatcagaagagacgatgaagtcttggttgttcgtggttccaagaagggtcaagaaggtaagatttcatctgtttacagattgaagtttgctgttcaagttgacaaggtcaccaaggaaaaggtcaacggtgcttccgttccaattaacttgcacccatccaagcttgttatcactaagttacacttggacaaggacagaaaggctttgatccaaagaaagggtggtaaattggaataa

SEQ ID NO: 190944 - DNA, 5269 bp, Saccharomyces pastorianus
atggaatcccaacaattatctcaacattcacatatatctcatggtagcgcctgtgcttcggttacttctaaggaagtccacacaaatcaagatccgttagacgtttcagcttccaaaattcaagaatatgataaggcttccactaaggctaactctcaacagacaacaacacctgcttcatcagctgttccagagaacccccatcatgcctctcctcaacctgcttcagtaccacctccacagaatgggccgtacccacagcagtgcatgatgacccaaaaccaagccaatccatctggttggtcattttacggacacccatctatgattccgtatacaccttatcaaatgtcgcctatgtactttccacctgggccacaatcacagtttccgcagtatccatcatcagttggaacgcctctgagcactccatcacctgagtcaggtaatacatttactgattcatcctcagcggactctgatatgacatccactaaaaaatatgtcagaccaccaccaatgttaacctcacctaatgactttccaaattgggttaaaacatacatcaaatttttacaaaactcgaatctcggtggtattattccgacagtaaacggaaaacccgtacgtcagatcactgatgatgaactcaccttcttgtataacacttttcaaatatttgctccctctcaattcctacctacctgggtcaaagacatcctatccgttgattatacggatatcatgaaaattctttccaaaagtattgaaaaaatgcaatctgatacccaagaggcaaacgacattgtgaccctggcaaatttgcaatataatggcagtacacctgcagatgcatttgaaacaaaagtcacaaacattatcgacagactgaacaataatggcattcatatcaataacaaggtcgcatgccaattaattatgagaggtctatctggcgaatataaatttttacgctacacacgtcatcgacatctaaatatgacagtcgctgaactgttcttagatatccatgctatttatgaagaacaacagggatcgagaaacagcaaacctaattacaggagaaatccgagtgatgagaagaatgattctcgcagctatacgaatacaaccaaacccaaagttatagctcggaatcctcaaaaaacaaataattcgaaatcgaaaacagccagggctcacaatgtatccacatctaataactctcccagcacggacaacgattccatcagtaaatcaactactgaaccgattcaattgaacaataagcacgaccttcatcttaggccaggaacttactgaatctacggtaaatcacactaatcattctgatgatgaactccctggacacctccttctcgattcaggagcatcacgaacccttataagatctgctcaccacatacactcagcatcatctaatcctggcataaacgtagttgatgctcaaaaaagaaatataccaattaacgctattggtgacctacaatttcacttccaggacaacaccaaaacatcaataaaggtattgcacactcctaacatagcctatgacttactcagtttgaatgaattggctgcagtagatatcacagcatgctttaccaaaaacgtcttagaacgatctgacggcactgtacttgcacctatcgtaaaatatggagacttttactgggtatctaaaaagtacttgcttccatcaaatatctccgtacccaccatcaataatgtccatacaagtgaaagtacacgcaaatatccttatcctttcattcatcgaatgcttgcgcatgccaatgcacagacaattcgatactcacttaaaaataacaccatcacgtattttaacgaatcagatgtcgactggtctagtgctattgactatcaatgtcctgattgtttaatcggcaaaagcaccaaacacagacatatcaaaggttcacgactaaaataccaaaattcatacgaaccctttcaatacctacatactgacatatttggtccagttcacaacctaccaaatagtgcaccatcctatttcatctcatttactgatgagacaacaaaattccgttgggtttatccattacacgaccgtcgcgaggactctatcctcgatgtttttactacgatactagcttttattaaaaaccagtttcaggccagtgtcttggttatacaaatggaccgtggttctgagtatactaacagaactctccataaattccttgaaaaaaatggtataactccatgctatacaaccacagcggattcccgagcacatggagtcgctgaacggctaaaccgtaccttattagatgactgccgtactcaactgcaatgtagtggtttaccgaaccatttatggttctctgcaatcgaattttctactattgtgagaaattcactagcttcacctaaaagcaaaaaatctgcaagacaacatgctggcttggcaggacttgatatcagtactttgttacctttcggtcaacctgttatcgtcaatgatcacaaccctaactccaaaatacatcctcgtggcatcccaggctacgctctacatccgtctcgaaactcttatggatatatcatctatcttccatccttaaagaagacagtagatacaactaactatgttattcttcagggcaaggaatccagattagatcaattcaattacgacgcactcactttcgatgaagacttaaaccgtttaactgcttcatatcattcgttcattgcgtcaaatgagatccaagaatccaatgatcttaacatagaatctgaccatgacttccaatccgacattgaactacatcctgagcaaccgagaaatgtcctttcaaaagctgtgagtccaaccgattccacacctccgtcaactcatactgaagattcgaaacgtgtttctaaaaccaatattcgcgcacccagagaagttgaccccaacatatctgaatctaatattcttccatcaaagaagagatctagcaccccccaaatttccaatatcgagagtaccggttcgggtggtatgcataaattaaatgttcctttacttgctcccatgtcccaatctaacacacatgagtcgtcgcacgccagtaaatctaaagatttcagacactcagactcgtacagtgaaaatgagactaatcatacaaacgtaccaatatccagtacgggtggtaccaacaacaaaactgttccgcagataagtgaccaagagactgagaaaaggattatacaccgttcaccttcaatcgatgcttctccaccggaaaataattcatcgcacaatattgttcctatcaaaacgccaactactgtttctgaacagaataccgaggaatctatcatcgctgatctcccactccctgatctacctccagaatctcctaccgaattccctgacccatttaaagaactcccaccgataaattctcatcaaactaattccagtttgggtggtattggtgactctaatgcctatactactatcaacagtaagaaaagatcattagaagataatgaaactgaaattaaggtatcacgagacacatggaatactaagaatatgcgtagtttagaacctccgagatcgaagaaacgaattcacctgattgcagctgtaaaagcagtaaaatcaatcaaaccaatacggacaaccttaagatacgatgaggcaatcacctataataaagatattaaagaaaaggaaaaatatatcgaagcataccacaaagaagtcaaccaactattgaaaatgaatacttgggacactgacaaatattatgacagaaaagaaatagaccctaaaagagtaataaattcaatgtttatcttcaacaggaaacgtgacggtactcataaagctagatttgttgcaagaggtgatattcagcatcctgacacttacgactcaggcatgcaatccaataccgtacatcactatgcattaatgacatccctgtcacttgcattagacaataactactatattacacaattagacatatcttcggcatatttgtatgcagacatcaaagaagaattatacataagacctccaccacatttaggaatgaatgataagttgatacgtttgaagaaatcactttatggattgaaacaaagtggagcgaactggtacgaaactatcaaatcatacctgataaaacagtgtggtatggaagaagttcgtggatggtcatgcgtatttaagaatagtcaagtaacaatttgcttattcgttgatgatatgatattgttcagcaaagacttaaatgcaaataagaaaatcataacaacactcaagaaacaatacgatacaaagataataaatctgggtgaaagtgataacgaaattcagtacgacatacttggcttagaaatcaaatatcaaagaggtaaatacatgaaattaggtatggaaaactcattaactgagaaaatacccaaattaaacgtacctttgaatccaaaaggaagaaaacttagcgctccaggtcaaccaggtctttatatagaccaggatgaactagaaatagatgaagatgaatacaaagagaaggtacatgaaatgcaaaagttgattggtctagcttcatatgttggatataaatttagatttgacttactatactacatcaacacacttgctcaacatatactattcccctctaggcaagttttagacatgacatatgagttaatacaattcatgtgggacactagagataaacaactgatatggcacaaaaacaaacctaccgagccagataataaactagtcgcaataagcgatgcttcatatggtaaccaaccatattacaagtcacaaattggtaacattttcctactcaacggaaaagtgattggaggaaagtcgacaaaggcttcgttaacatgcacttcaactacagaagcagaaatacacgcagtcagtgaagctattccgctattgaataacctcagtcaccttgtgcaagaacttaacaagaaaccaattattaaaggcttacttactgatagtagatcaacgatcagtataattaagtctacaaatgaagagaaatttagaaacagattttttggcacaaaggcaatgagacttagagatgaagtatcaggtaataatctatacgtatactacatcgagaccaagaagaacattgctgatgtgatgacaaaacctcttccgataaaaacatttaaactattaactaacaaatggattcattag

SEQ ID NO: 190945 - DNA, 2811 bp, Saccharomyces pastorianus
atggaggaacaatttactaatcagaagaaagtatcacatctacagtcattaatgaacactaaaaggagtgaacagcccaccgaatttgccaaaaaacataggtttaaagatacgcttgcattgttcctggtttttttgagttttaaccacttcacttccctatgtttattggtttcctttattgttgctaccaaatgcaaagattttctggcaaattgttttattatacttttcctatcgaaaaaaccttcccgccatatcggtgaagtggcgcacatagatataagtacttccaaagtgaccaatggtagttcaaaccgaaaatctaattcacgattttttggcaattcaaaaaatagcttcgtcattccgatccccgtattaatttgtgaaattttatttgcaatgttactaaagatttacggtggcgattattttgttaagccaataaaaaatctggcaatttctattattgcctcatttttgatcaatgatccaagcgattgcttaagctatgcaacttcatgctcagtattgtatgctgtgtcaactaacacttttcaaagagtgtcacacttctttgacattatacagttatttgatatgtctttacgaggaaccggccaatcaattaaattattcacggtttttcgcaagtattcacagtttttcaaaaagcttttctctctatttttgccaatgcctttcaagatgcttggcaaacattcagacagtatgatttattatctatcctttcacatcctttttttctcatttgcttcaagtttattacaccctcatagacaaacagcggaaaacaagccattgaaaaagggtttcaattcaactaaaccagatgtagcccgtgttcaaggtctgcaaaagatgagaatttcttcttcttcttccgtttctgccgattcgaacactttagaggaccaaagtcctatgataccgaacgatccaggtggacttagcagcagcaatcaaactatccatccatcccaacaaaataactcgccagttcccctatcatcacacagtaatattttgaaccctgccgcctcttatcctactgatgctacttctagttttccctatttcacttctatggtcaaggaatataagtcatatcagccatcggtaatctctgctgaaggaagcaattctcaagccgttactactactaccagtacaacaacctctcctacaacgttcaacttttctggtgataacactagtttgtcaaatgaaatctctctatctgattcctcgaatggaaattcgaaaaaggattctgatttcttttccccttccaatgacaagtatactaaccaactgtttgaactgaatgttgattttgggaacatgttttcttctagcaaattatcttcagacatatctgttacatcaaacttggaaaattttatccgtcttctattcagaagaaagaatcaacacttgattgcacctctttggtctatggtagttacattaaaaacaacgaattttgaaaaaaaatacttacaagaaacctctgaaaattcactaacaccaacaaattcgaatacttcatacgtcagtaatcaggaaaaacatgacaaagatttggacacgattaatacacattcagtttcatcaagaattagtttcacccatgccggaaagtttaagaagagcgtgtttaacaatttcgaaccttcaaatactatggccctgattgcaaagacaacatctgatgactacaatcttttaaatttagtttccaccaatgaaaatattttcaatagaaatgataatgactacaaagtttgcattattgatattagcacaaactctattacattccatattgaaaatttacatgatggcgaactcattgttttagtaaacggtgttatctggtcagaagtttcttgcgctttaattttagagcatgtaggcgaagaatacgttgtcgttaacggattagtcccttcttgttcttatgatattcaattcatcaacagactaaatcaccgagatgattatttggtttctgatttaattgtaaggacttgtgggaataacaatgcgattgccggaaaatttgaaaaccttgatttcagcttcccttcatactaccataggaaattcttatctccgttgctaactctgaagcattccgtgctaactacaaacgcaaatttgtccgatgaaaggacaaaattgaaaaagacaaaaaaggaattcagcaagaagttaagtcttttgagacaagaaattgattattttaaaggcaggatttcacagaacgcaacacatgacgaaaagagcactttaaaagtcgaaaatttgaaggttgccctacagcaaagtgagactgcggtaaataagttagagatgcaattgaaaactctcactgaaaaagagcttgaattagaagaggaatacttgaaaaagaaagatctacacttgaaaaatcaattagagttcagtaagttagaagaaagcttatcgaaagacctgaaaaactcagaagggaggttccaaaaggtcaatcaagaattagttcaactaggctctaaactggacaaattgaacgcgagaaacgagaagttacaaaaggaggtcgatcagaacgcagaagagatagaaaagttcagtactcaatttttgagtaaaagagaaaaggatagatttagaagaaaggagtacaggatacgcgaagccaataaatttgaattgactataaaggggttagagcaagatatcaacagattagaaaatgagaatgaaaatatacatagtctaattggtaatagttactga

SEQ ID NO: 190946 - DNA, 450 bp, Saccharomyces pastorianus
atggtgttatccaattatttagtaagcttcgcttgtactcagtcattttttttttttgcatccaattttattgaaagtccgcccgctctgttaaaaaaggcgtttcttccaaatttgaataggacacgatcgagattccctccgattaattatgtgctactggctcctctttcgtcgtattgcaagtggacttttcaacgaggctatgcatgcccagtgtcattcttgaagcaggcacacacagacgcgcttcaattagttttctttactagatgcatcatttgggcggtttttcactaccgttttcgagtaggggctctcacaaaacgggcacgaccttttgtttacaaccgcccaaagaggaaaaacatcaacaatcaagaagcggacacaaaatatagaagcaccataaaactcacgtcaacggtaactttaaatttgttgtattaa

SEQ ID NO: 190947 - DNA, 873 bp, Saccharomyces pastorianus
atgagctttatggatcaaatcccaggaggaggaaattatccaaaactcccagtagaatgccttcctaacttcccgatccaaccatctttgaccttcagaggtagaaatgactcgcataaactgaaaaactttatctccgaaataatgttaaacatgtctatgatatcttggccgaatgatgccagtcgtattgtgtactgcagaagacatttattaaaccccgctgctcagtgggctaatgactttgtacaagaacaaggtatacttgaaataacattcgacacattcatacaaggattatatcagcatttctataagccaccagatatcaataaaatctttaatgcaatcacgcaactttccgaagctaaacttggtattgagcgtctcaaccaacgattcagaaagatttgggacagaatgccaccagacttcatgaccgaaaaagctgccataatgacatatactaggctattgacaaaggaaacctataatattgtcagaatgcacaaaccagagacattaaaagacgccatggaagaggcttaccagacaactgcactaactgaaagattcttcccaggattcgaacttgatgctgatggagacactatcatcggtgccacaacccacttacaagaagaatacgactctgactatgattcagaagataatctgacccagaatggatacgtccataccgtaaggacaagaagatcttacaataaaccaatgtcaaatcatcgaaacaggagaaataacaacccatctagagaagaatgtataaaaaatcggctatgcttctattgtaagaaagagggacatcgcctgaacgaatgtagagcacgtaaggcgagttctaaccgatcttga

SEQ ID NO: 190948 - DNA, 129 bp, Saccharomyces pastorianus
atggaattggtgtccctatgtaatacaattacgattatttctcattcggttttatatgtttcattatcctattacattatcaatccttgcacttcagcttcctctaacttcgatgacagcttctcataa

SEQ ID NO: 190949 - DNA, 636 bp, Saccharomyces pastorianus
atgagcaccgcattcaacgattactgcactgtttgtgatcgtctcattccaacatctccacagaaaacgaacattaataccaggaagatccaaagggacaatgaaaccaagagcagtttacaatcaaataagttatattgctccgaagattgtaagctgaaggattcgaaccctcttaatgagaaattattatcccacttgcataaaaaatcaaaaacttctcattcgcataatctcactccaccgctttcatattctaaaaatttaactgcatcaaacctcttcgagccgactacctcactatcttcatctccgacatcttcaactatcccctttgacgagttggagaagctagagtccttattaatttcaccattgctgctacctcaggatggtatagtcaatcctaagcaggagtctaatccttctcgtgttgacgaatatgatgaaaatgaacattatttgaacttagccgactctcttagactcgattctagttaccaattgcattcaaaggcacatttgggttacgaaaacaacttgccacgatcaaacgatctaattgatgatcatttgatctcagatcagatcattgagaataactacaacctatggtttagactatcctccagttaa

SEQ ID NO: 190950 - DNA, 468 bp, Saccharomyces pastorianus
atgaaggttgaagttgattccttttccggcgctaagatctacccaggtagaggtactttatttgtccgtggtgactccaaaattttcagattccaaaactccaaatctgcttctttgttcaaacaaagaaagaacccaagaagaatcgcttggaccgtcttgttcagaaagcatcacaagaagggtatcaccgaagaagttgctaagaagagatctagaaagaccgttaaggcgcaaagaccaatcactggtgcttctttggacttgatcaaggaaagaagatctttgaagccagaagttagaaaagctaacagagaagaaaaattgaaagccaacaaggaaaagaagagagctgaaaaggctgctagaaaggctgaaaaggctaagtccgctggtgtccaaggttccaaggtttccaagcaacaagctaagggtgctttccaaaaggttgccgccacttcccgttaa

SEQ ID NO: 190951 - DNA, 5314 bp, Saccharomyces pastorianus; identical to SEQ ID NO: 190917

SEQ ID NO: 190952 - DNA, 354 bp, Saccharomyces pastorianus
atgtctcgccaaagcgcattcaaatttcagaatggaaatagacacgaacgagcctgtctgtcagatgttcacaaaatccttattataattttatattctactaaaggaaaaagagaattaggaaaaagaataactcattttatgtatatacatatattttgtacatatctataccaagcaagtatagtgcaatactgttcttcgacgttattaaacgtaatagcattttcttggtatcctttgaatcttatatacaagtacgagtacatactgcgcagtaaattgatcctgatggtgtgtttagatttcgccagaagcggaggcgttctggattctggagatgtaagcctttga

SEQ ID NO: 190953 - DNA, 414 bp, Saccharomyces pastorianus
atggtatgttggtgtgtgtgtgtgctgcttcacatttcaggctaaaaatgttatccgtggaatcttccttagccaagtatcatgggctttggaaattagtttcccaccgatgagcgcaacgacttagcgaagcttatgaaattggtgacagcagctctatgaatatgttccatgcgtttccattcaggttactaacaatgcataaattatgagtagtctttttcatcactatataaaacctttttcaaacgaaacgctgtttttgttggtactatctttgcaggtgcctttgttttccaaactgtatttgatactgctattacttcatggtacgagaatcacaacaaaggaaaattatggaaagatgtcaaggctcgaatagctgcaggcgatggagacgacgatgatgagtaa

SEQ ID NO: 190954 - DNA, 192 bp, Saccharomyces pastorianus
atggatgcgaacaccttaaacgtatctttcgaagagatattgaagggaaagaaattggatgaagattccatcggattaacattatcacctgataaagatcatgaggatggatcacaagtatcacctacacaggatagaaaagaattggatcaagttgtgggagaagatgaaaaggatgacttttttgagtaa

SEQ ID NO: 190955 - DNA, 444 bp, Saccharomyces pastorianus
atggaccacagggctgcttttggatattttagcaacgcctgcttcaaagtcatgcttttttcctcgctgttagcttcatttgcatcatcagtagcgttcatctcattaatcacattctcgttatcttcgtcagaatctcctaactgggctgaattggtggtgaactctaagtggtctagctcaaaggcactatcctttttcccttcttcaaaatcttcagtattgaaaacctcctgttggtttacaatatctcttgaagactcagaaatgtttttatcctcattttttgaggcagccttcttcttgcttaccaatgaaatgatatttttcatattatactatttttttagttgtttgatgttcttctatgtagcatcagaaagaaacaccaacccgaaaattcttcaaacaatcaataccaaaccgctttatataaaaaattaa

SEQ ID NO: 190956 - DNA, 222 bp, Saccharomyces pastorianus
atggaactttttataccttgcccagagcgcctcaagaaaatgatgctgcaagaagaattgaggaaggaactattcatcttacgttgtttgtatcatcccacgatccaaatcatgttacctacgttaggtacgctaggaactaaaaaaagaaaagaaaagtatgcgttatcactcttcgagccaattcttaattgtgtggggtccgcgaaaatttccggataa

SEQ ID NO: 190957 - DNA, 1146 bp, Saccharomyces pastorianus
atgaaagagaatgaacttaaaaatgagaagagtgtagatgtattatccgtcaaacagctcgaatcccaaaagactgttctacctcaagatcttttcagaagcagctttacctggttttgttatgaaatttacaagtccttagtgtttcgcatctggatgctattatggctaccacttagcgtctggtggaaactttccaacaattggatttacccgcttatggtttcacttcttgtcctgttttggggaccagtatttgttcttgttatttttagactttctcgtaaacgttccttatcgaaacaactcactcagttttgcaaagagattactaaaaacacaccaagttcggatcctcatgattgggaagtcgttgcagcaaatctaaattcgtacttctatgaaaataaggcttggaataccaagtacttttttttcagtgccatgagctgccaagaagcattcagaacaacccttctcgaacccttctctttgaaaaaagacgaagctgccaaggttaagtcatttaaggattccgtcccttacattgaagaagcattggaagtttattttacagaagttgaaaaacaatggaagttgtttaattctgagaaatcatggagccctgttggcctggaagatgctaaacttcccaaggaagcttaccgatttaagcttacctgggttctcaaaaggattttcaaccggcggtgtttaccactcttccttttttatttgcataatgtcttcatttcacgaaatgatggcactatagcacgtcccttgtttcttgtggtgctgttttttatcatgacgagagatttccggaatatgaggatgatcgttttatccgtgaaaatggaacacaagatgcagtttttatcgactattataaatgagcaagaaagtggtgcaaatggatgggacgaaattgcaaagaaaatgaataggtacttgtttgagaaaaaagtctggaagaatgaagagtttttctttgacgggattgactgtgaatggttttttagccacttcttctaccgcgttctctctgcaaagaaatctatgcgggctctatcattgaatgtggaactatggccatatattaaagaagcgcaattatcctgcagtgaggagtccttagcgtaa

SEQ ID NO: 190958 - DNA, 1242 bp, Saccharomyces pastorianus
atggcgaccccagtgagggatgaaacaagaaatgttattgacgacaacatttctgcgcggattcaatcgaaagtcaaaacaaatgatactgtcagacagacgccatcatcattaagaaaagtttctattaaagatgaacaggtgaaacaatatcaaagaaacttaaataggtttaaaaccatactaaatggtttaaaggcagaagaggaaaaactttctgagactgatgatattcagatgctagctgaaaaattattaaaactcggagaaaccattgacaaggttgagaataggattgtggatctagttgaaaagatacaattattggaaacaaacgagaacaataatatattacatgaacatatagatgctacagggacttactatttattcgatacgttaacttcaaccaacaaaagattctaccctaaggattgtgtttttgattataggactaataatgtcgagaacattcctattctcttaaacaattttaaaaaattcatcaagaaatatcaatttgatgatgtctttgaaaatgatatcatagaaatcgatcctcgtgaaaatgaaatcttgtgcaagataatcaaagaaggactcggtgaaagtttagatatcatgaacacaaatacaactgacatttttaggataatcgatggtttaaaaaacaaatatagaagtttacatggtagagatgtcagaattagagcctgggaaaaggttttggttgatacaacatgtagaaattccgcattgttaatgaataaacttcaaaagttggtactaatggaaaaatggattttttctaaatgctgccaagattgtcctaatctaaaggattacctacaagaagctatcatgggaaccttacatgaatccttaagaaattctgtgaaacaacgtttgtacaacattccacataacgtaggaattaatcacgaagaatttctaatcaatactgttattgaaacagtaattgatttgagcccaattgcagacgatcaaatagaaaatagctgcatgtattgcaaatctgttttccattgctcaattaactgcaaaaagaaaccaaatagggaacttaggcctgactcgaccaatttctcaaaaacctattatctacaaggtgcacagagacaacaacaacttaagtccagtgcaaaacgaacaaaagtcttggaacaagacacaaaaaaagtcaaacaaagtgtacaacagcaaaaaactggtaattattga

SEQ ID NO: 190959 - DNA, 5410 bp, Saccharomyces pastorianus
atggcgaccccagtgagggatgaaacaagaaatgttattgacgacaacatttctgcgcggattcaatcgaaagtcaaaacaaatgatactgtcagacagacgccatcatcattaagaaaagtttctattaaagatgaacaggtgaaacaatatcaaagaaacttaaataggtttaaaaccatactaaatggtttaaaggcagaagaggaaaaactttctgagactgatgatattcagatgctagctgaaaaattattaaaactcggagaaaccattgacaaggttgagaataggattgtggatctagttgaaaagatacaattattggaaacaaacgagaacaataatatattacatgaacatatagatgctacagggacttactatttattcgatacgttaacttcaaccaacaaaagattctaccctaaggattgtgtttttgattataggactaataatgtcgagaacattcctattctcttaaacaattttaaaaaattcatcaagaaatatcaatttgatgatgtctttgaaaatgatatcatagaaatcgatcctcgtgaaaatgaaatcttgtgcaagataatcaaagaaggactcggtgaaagtttagatatcatgaacacaaatacaactgacatttttaggataatcgatggtttaaaaaacaaatatagaagtttacatggtagagatgtcagaattagagcctgggaaaaggttttggttgatacaacatgtagaaattccgcattgttaatgaataaacttcaaaagttggtactaatggaaaaatggattttttctaaatgctgccaagattgtcctaatctaaaggattacctacaagaagctatcatgggaaccttacatgaatccttaagaaattctgtgaaacaacgtttgtacaacattccacataacgtaggaattaatcacgaagaatttctaatcaatactgttattgaaacagtaattgatttgagcccaattgcagacgatcaaatagaaaatagctgcatgtattgcaaatctgttttccattgctcaattaactgcaaaaagaaaccaaatagggaacttaggcctgactcgaccaatttctcaaaaacctattatctacaaggtgcacagagacaacaacaacttaagtccagtgcaaaacgaacaaaagtcttggaacaagacacaaaaaaagtcaaacaaagtgtacaacagcaaaaaactggtaattattgataccggttccggcgtaaacattaccaatgacaaaaccttactgcataattacgaagacagtaatcgcagtacacgattttttggtattgggaaaaacagttcagtgtctgttaaagggtatggctatataaaaatcaagaatggtcacaacaatactgacaataagtgtttattgacttactatgtaccggaagaagaatccactataatcagctgttatgacttagccaagaaaaccaaaatggttttaagtcgaaaatataccagattgggaaacaaaatcataaaaattaaaaccaagatagttaatggtgtcattcacgtaaaaatgaacgagttaattgaacgtccttccgatgattcaaaaataaatgcaataaaacctacttcttctcctggatttaaactaaataaaaggtctattaccttggaagatgctcataaaagaatgggccatacaggaattcaacaaattgaaaattccataaaacataatcattatgaagaatcccttgacttaatcaaagaaccaaatgaattttggtgtcaaacctgtaaaatctctaaagccacgaaaagaaatcattataccgggtctatgaataatcatagtactgatcatgaaccaggatcatcatggtgcatggatatatttggccctgtatcaagttcaaacgcggacactaaaaggtacatgcttattatggtggataacaacacgagatattgcatgacctccacacacttcaataagaatgctgaaactattttagctcaaatcagaaagaatattcagtacgtggaaacacaatttgacaggaaagtcagagaaattaattcagacagaggtactgaattcacaaatgatcagatagaagaatattttatttcaaaaggaatacatcacatacttacttctacacaagatcatgctgctaatggaagagcagaaagatacatcagaacaatagtaactgatgcaacaacactcctaagacaaagtaacttaagagtaaaattttgggaatacgcagtaacttctgctaccaatataagaaattgcctggaacacaaaagtacaggtaaactaccattgaaggcaatctcacgtcaacctgttacagtgagattaatgtcattcttaccatttggcgaaaaaggaataatttggaatcataatcacaaaaaattgaaaccatctggacttccttctataattctatgcaaagatccaaatagttatggatacaaattctttataccatccaaaaataaaattgtcacatctgataattatacaattcccaactatacgatggacggtagagtaagaaatactcagaatatttacaagagtcatcaattcagttcacataatgataatgaagaagatcaaatcgaaacggtcacaaacttatgtgaagctttggaaaactacgaagatgataataaaccaattactcgcctggaagatttgttcacagaggaagagttatctcaaatagactcaaacgcaaaatacccatctcctagtaataacctagaaggggacttggattacgtattttctgatgttgaggaatctggagattatgacgttgaatctgaactttcaacgacaaatacttcaatctcaactgataaaaacaaaattttgtcaaacaaggattttaattcagaacttgcatcgactgaaatatccatcagtgaaatcgataagaaaggattaataaatacaagtcatattgatgaagataagtatgatgaaaaagtccacagaattccatcgattatacaagagaaactggtaggaagtaaaaatactattaaaatcaatgacgaaaacagaatctccgacagaattcgtagtaaaaatattgggagtatcttaaacactggactcagtagatgtgtagatatcaccgatgaatctattactaacaaagatgagtcaatgcacaacgcaaaacccgaactaattcaggagcagttcaataaaacaaatcatgaaacttcgtttcctaaagaagggagcattggaacaaatgtaaaattccgaaatacagacaatgagatttctttaaaaacaggcgatacgagtttaccaataaaaactttagaaagcattaacaatcaccatagtaatgattattccacaaacaaagttgaaaagtttgagaaggaaaatcatcatccgcccccgattgaggacattgtggatatgagtgatcaaactgatatggaatcaaactgtcaggatggtaataacttaaaagaattaaaagtcaccgataaaaatgtaccaactgacaatggaacaaatgtgtcaccaaggttggaacaaaatattgaagcatctggatcaccagtacaaacagttaataaaagtgccttcttaaacaaagaattcagttctttgaacatgaaaagaaaacggaaaagacacgataaaaacaatagtctaacaagctatgaattagaaagagataagaagcgttcaaaaaggaatcgagtgaaattaattccagataatatggaaacagtttcagcacaaaaaattagagccatatattataatgaagctatttcaaaaaatcctgacctcaaagaaaaacatgaatacaaacaggcatatcataaagaattacagaatttaaaagatatgaaggtatttgatgtcgatgtgaagtacagtagatcagaaatccctgataatttaatagtacccaccaacacgatattcacaaagaaaagaaatgggatttataaggctaggatagtctgcagaggtgatactcagtcaccagacacttacagtgtaataactacagaatctttaaatcacaatcatattaagatattcttaatgattgcaaacaacagaaatatgtttatgaagaccctggatatcaatcatgcattcctatatgctaaattggaagaagaaatatacatcccacatccgcatgataggagatgtgtagtcaagctaaataaggcgttatatggtctaaaacagagtcctaaagaatggaatgatcatctaagacaatacttgaatggaattggactgaaagataactcttatactccgggattataccaaaccgaggataaaaatctaatgattgcagtctatgttgatgactgcgtaattgcggcaagcaatgaacagagattggatgaattcataaacaaattgaaaagtaattttgaactgaaaattacaggaacattaatagatgatgtactcgatacagatatattaggaatggatctagtatacaacaaaagacttggtactatcgatttaacattaaaatcattcataaatagaatggataaaaaatacaacgaggaattgaaaaagattagaaaaagttcaattccgcatatgtcaacttataaaatagatcctaagaaagacgtactgcaaatgtcagaagaagagtttagacaaggtgttctaaagctacaacaattactaggtgaactaaactatgtcagacacaaatgcagatacgacattaattttgctgttaagaaagtggctagactagtaaattacccacatgaaagagtcttttatatgatttacaaaataatccagtacttggttcggtataaagatattggaatacactatgaccgagactgtaataaagacaagaaggttattgctataactgatgcatcagttggatcagaatatgatgctcaatcaaggattggagttatattatggtacggtatgaatatttttaatgtttattctaacaagagcacaaacagatgtgtatcatcaacagaagcagagcttcatgccatttatgaaggctatgcagactcagaaacgttgaaggtaacattaaaggagctaggagaaggagacaataatgacattgtcatgatcactgactcaaagccagccattcaaggattaaatcgcagctatcaacaaccaaaagagaaattcacttggataaaaactgaaataataaaagaaaaaattaaagagaagagtataaaactgttaaaaattaccggcaaaggtaatattgctgatttactaacaaaaccagtatcagcatctgattttaaaagatttatacaagtattaaaaaataaaataacatcacaggatattttggcctcaacagactattga

SEQ ID NO: 190960 - DNA, 84 bp, Saccharomyces pastorianus
atgactgcttttgcatctttaagagaacctttggtcttggctaatctcaaaattaaagttcatatctaccgtatgaagcgctga

SEQ ID NO: 190961 - DNA, 327 bp, Saccharomyces pastorianus
atgaatgcagaaaacaggaatatagcttttaattgccaagtatcatactttttagccattagctcagacttacgaataatcaatgattttgttccctttaatttatctttcatttcatctctgggcgacgaatcgtcatccatcttttcatcaaccatcagttcattacaatttttttcagtattcttacgctttgtttggctagaacgattgtcttctgggacttcgatcatatttcctttggcccaaagagttacaactgtttttggagctcaagtggaaaggacacaagcaaagttcttctaccaggatctcatgtctttatag

SEQ ID NO: 190962 - DNA, 1914 bp, Saccharomyces pastorianus
atgatcgaagtcccagaagacaatcgttctagccaaacaaagcgtaagaatactgaaaaaaattgtaatgaactgatggttgatgaaaagatggatgacgattcgtcgcccagagatgaaatgaaagataaattaaagggaacaaaatcattgattattcgtaagtctgagctaatggctaaaaagtatgatacttggcaattaaaagctatattcctgttttctgcattcatttgcactttcgcttatggattagatagcagcataaggggtacatatatgacctacgcaatgaactcgtactccgcacattctctcatttctacagtaagcgtcatagttctaatgatatctgctgtttcacaggtgatctttggagggttatcagatatctttggaaggctaacgttgtttcttgtatccattgtactttacattgtgggtacaataattcaatctcaagcatatgatgtccagaggtatgctgctggagctgtcttttattatgtgggacttgtcggtgttatgctacaggttgttttgatgttgtctgataattcttcattaaaatggaggctattttacacattgataccttcatggccctcgattatcactacgtgggtctcaggtagtgtagtggaggcagcaaacccgttagagaactggtcgtggaatattgctatgtgggcgttcattttccctctatgctgtatcccattgattttgtgtatgctccatatgagatggaaagtaagaaatgacgtggaatggaaagaattacaggatgaaaaatcgtactatcaaacgcacggattagtacaaatgctggtacagttgttctggaagctagatgttgtcggtgtgttgttgtttactgctggtgttggttgtattcttgtaccactcactcttgctggtggcgtctctacaaattggagaaattcaaagattatcgggccctttgtgcttggctttgtcctggttccaggcttcatatattgggaaagtcgacttgctttggttcctttcgctccattcaagctgctaaaagatcgtggcgtgtgggccccattgggaattatgttttttatctgctttgtatatcaaatggctgctgggtatctctacaccattctagtagttgcggtagatgagagcgcttcctcagctacaagaataataaacttatactcttttgtgactgctgttgttgctccatttctggggctcatcgttacgagatcatctagattgaagtcgtatattatttttggtggctcactttatttcattactatgggactattttaccgctacaggtcaggtcaagacgccgatggaggtataattgctggtatggttatttggggtctcagtagttgtttattcgattatcctacaattgtttctattcagtcggtaacatcccatgagaatatggctactgtcacagcattaaactatacagttttcagaataggtggagcagttgcagctgccatttccggtgccatatggacgcagtcattgtaccctaaattattgcactacatgggagacgctgacctggctacagcagcatatggctcaccactaacttttattctttccaatccctggggtactccagttaggtctgcgatggttgaagcttacagacacgttcaaaaatacgaagttattgttgcgcttgtattttcagcgcctatgttccttctaacattctgcgtaagagatcctcggttgactgaagattttgcccaaaagttacctgacagagaatatgtccaaaccaaggaagatgatcctatcaatgactggatcgcgaaacgttttgcaaaggccttaggaggtcataagaaagatttacaaaaccccaacaggatatgtgttcgaaaaaatgatctctga

SEQ ID NO: 190963 - DNA, 135 bp, Saccharomyces pastorianus
atgcatgacatctgggtaatcaccacttctcccgcttgctttgagattctgtataaatattgcaaacaaaagggtagagcacggatgggaggccttatagtaaaaattattcgttttaatcatgcgtcagtgtga

SEQ ID NO: 190964 - DNA, 1146 bp, Saccharomyces pastorianus
atgaaagagaatgaagtcaaagatgagaaaagcgtagatgtgttatccttcaaacagctcgaattccaaaagaccgttctacctcaagatgttttccgaaacgaattgacctggttttgttatgaaatttacaagtctttagcgtttcgcatctggatgctgttatggctaccacttagcgtctggtggaaactttccagcaattggattcacccacttatagtttcacttcttgtcctgttcctgggaccattttttgtccttgttatttgtggactttctcgtaagcgttccttatcgaaacaactcattcagttttgcaaagagattactgaagacacaccaagttcggatcctcatgattgggaagtcgttgcagcaaatctaaattcgtacttctatgaaaataagacttggaataccaagtacttttttttcaatgccatgagctgccaaaaagcgtttaaaacaacccttctcgaacccttctctttaaaaaaagacgaatctgcaaaggttaagtcatttaaggattccgttccttatatcgaagaggccttgcaagtgtatgctgcaggatttgacaaagagtggaagctgtttaatactgagaaggaagagagtcctttcgacctggaagacattcagctccccaaagaagcttaccgatttaagcttacctggattcttaaaaggattttcaacctgcggtgtttaccactcttcctttattattttttaattgtctacacgtctggaaatgctgaccttatatcacgtttcttgtttccggtagtaatgttttttatcatgacgagagatttccaaaatatgaggatgattgttttatccgtgaaaatggaacacaagatgcagttcttgtcaactattataaatgagcaagaaagtggtgcgaatggatgggacgaaattgcaaagaaaatgaataggtatttgtttgagaaaaaagtctggaataatgaagagtttttctacgatggacttgactgcgaatggttttttaggcgctttttctatcgtctcttatctttaaaaaaacctatgtggtttgcttcgttgaacgttgagctatggccatacattaaagaagcgcaatcggcccgcaatgagaagcccctaaagtag

SEQ ID NO: 190965 - DNA, 816 bp, Saccharomyces pastorianus
atgaaagtttccgataggcgtaagtttgaaaaagcaaactttgacgagtttgagtcggctctaaataacaaaaacgacttggtacattgtccctcaataactttatttgaatcgatccccacggaagtgcggtcattctacgaagacgaaaagtctggcctaatcaaagtggtaaaattcagaactggtgcaatggataggaaaaggtcttttgaaaaaattgtcgtttccgtcatggtcgggaaaaatgtacaaaagttcctgacgtttgttgaagacgaaccagatttccagggcggaccaatcccttcaaagtatcttattcccaagaaaatcaacttgatggtctacacgttgtttcaagtgcatactttgaaattcaatagaaaggattacgataccctttctcttttttacctcaacagaggatactataatgagttgagtttccgtgtcctggaacgttgtcacgaaatagcgagtgccaggccgaacgacagctctacgatgcgtactttcactgactttgtttctggcgcacctattgtaaggagtcttcagaaaagcaccataaggaaatatgggtacaatttggcaccccacatgtttttgttactacacgtagatgagctatcgattttttctgcataccaagcaagtttacctggcgaaaagaaagtcgacacagagcggctgaagcgtgatctatgcccacgtaaacccactgagataaagtacttttcacagatatgtaacgatatgatgaacaaaaaggaccgattgggtgatgttttgcatgtgtgctgcccaagttga

SEQ ID NO: 190966 - DNA, 120 bp, Saccharomyces pastorianus
atgaagggcagcaaactttttcaaatgcaaaaatgcatgcccgtttggtgccgtacgggcacgtgtattattttgccggtggcatgccacatggcgaaacccttaaaattaccaacataa

SEQ ID NO: 190967 - DNA, 180 bp, Saccharomyces pastorianus
atgaaactccttcagggtcgaatgacgtataggggagatgcacacccccacccccgcatcacacccagtcttctagccaattatgttggtaattttaagggtttcgccatgtggcatgccaccggcaaaataatacacgtgcccgtacggcaccaaacgggcatgcatttttgcatttga

SEQ ID NO: 190968 - DNA, 507 bp, Saccharomyces pastorianus
atggtatgtgccattacattacgtgtcaacacttctgtctctaacaagcgttcttactaacatgaaaaacttttttaaaactgtgctctcttgttggactggtacctcgtgacaaaggtattggttttttcattgttgctcagaactatgtaatattctctttagtcccaaaaaaacggaattgccaccctactacaagctgaaaaggaagcccacgaaatagtatcaaaggctagaaagtacagacaagataagttgaagcaagccaagactgatgcagccaaggaaatcgactcatacaaaattcaaaaagacaaggaattgaaggagtttgaacaaaagaatgccggtggtgttggtgaattggaaaagaaagcagaggctggtgtgcaaggtgaattagctgagattaagaaaattgcagagaagaaaaaggatgacgttgtcaaaattttgatcgagactgtcatcaagccttctgctgaagtccatatcaatgccttgtaa

SEQ ID NO: 190969 - DNA, 741 bp, Saccharomyces pastorianus
atgccacaattttcagtagatctttgtctttttgacctagatgggactattgtcagcacaacaactgcagcggaaagtgcctggaaaaaattatgccgtcagcatggggttgatcctgttgagttattcaagcattcccatggtgcaagatcacaagaaatgatgaagaaattttttccaaaattggacaataccgataataaaggtgttcttgcgttagaaaaggatatggcagataattatttggacacagtaagccttatccctggtgcagagaatttattgttatcgttagatgtagatactgagactcaaaaaaagttacctgaaaggaaatgggctatcgttacctctggttctccatatttggcattttcatggttcgagacaatattgaaaaatgttggaaagcccaaagttttcattactggatttgacgtgaagaacggtaagcctgatcccgagggttactcaagagctcgtgatttattgcgtcaagatttgcaattaactggtaaacaggatctgaagtatgttgtctttgaagatgcacccgtgggcataaaggccggcaaagcaatgggcgcaattactgtgggtataacatcctcgtatgataagagcgttttatttgacgcaggtgcagattatgtggtctgtgatttgacacaggtttccgtggttaagaacaatgagaacggtatcgttatccaggtaaacaaccctttgacgagagattaa

SEQ ID NO: 190970 - DNA, 411 bp, Saccharomyces pastorianus
atgacgcatcgcgcagtgccctgtcagccccgcgccttctcgaagataaaggtgttagtcatctcgtttctttttctaatggtcgcctttttgcctttttcctcccacggcaaactgcaagagcagatcgcttcatacgttagctggaagttggaaactcgcgcaatacatcggtttggtgggtgcaactttgcgcaccaaatgcaacgaaacggcattcaacggaagatcgtctgcagtgaccttgagcgcggcaataatacgggcatgaacgcgtgcatgcaactcgtcctcagtgacttggtcgccaggcgggtacttctcaaaacagtgcacgtgcacccatggcatttggatggtatcagtggcgcctttagtgtgtgctgcaaagatgccacggaagtttcctaa

SEQ ID NO: 190971 - DNA, 321 bp, Saccharomyces pastorianus
atggtgggtcgtttgcggcttgctgaggggttaaatattcccagctttctcggcctagctcatcagttctcagtctccaaagacgtggatctgtctttggtagaccgattgtgtcagaataaaattctgtcatctgttttgtactttctttgtgggcgacgattattggtaaggttattgggcacagcagtacattactggagaggcttgtgctcaatggctttattaaaagctgagggcatgtattatatttttttttttttgagaaaatgtatatctgtaaataaccgatataaaaacttttcacctaaacgattataa

SEQ ID NO: 190972 - DNA, 690 bp, Saccharomyces pastorianus
atggatggaaatcataggtttactccagattccaaagaatttaatactgttgtaaaaagtaaagagtcttccactggcagaaatccgtatcagactccgcccttagagcacaacggtactcatcatcagacaaattacagcagaaagaaaacaaatctagcaattatcatatcgaatttcttgtccgagatcagtcggcctctttcaaatggcaaaatcaataattctacccacaacattttaaaatttctaaatgaagtgcttaagagatcgaagtgcagtaaagaaaacgctgtgttagccactttctactttcaaaagattcaccaatccagaggtgtccgggatgagtcctcattgcctgaattctcgcactgttcccgcagaatttttctctgctgtcttattctatcgcacaaatttttgaacgacaacacttactcgatgaaaaattggcaaattataagtgggctccatgcaaaggatctatctctaatggaaagatggtgtctgggtaagctgaattatgagctggccattccatatgacgagtttttgctatgggaaacgaacactttaatgaaagcgaaattgcgcgtcggaactcccgccaacgctccggtgaagagacccagagaatcagacaatgattatgatgcaaattcttggaaacagattaaatcttgttaa

SEQ ID NO: 190973 - DNA, 762 bp, Saccharomyces pastorianus
atgggtatgtggacgattaggaatagacaaaccatgttatttatctccattagggcgtgagagtgtaattagtacacaggtactactagaatgctaaagaactttttaaaatatcctgaatcgtagggcaaatccatgtcaagcaagaaactaatagttattaaacttcatttacttttgagctagttaaatattttcatcatttcctaaagtactgaacacctgaatgatacttttattggcccttttaataagaactctggttagaaaatatattgaggatatcattagtaatactcattagatatttgtgaatttagccgtttccccattacagaaaaaagatacaactaattacatgtgcagtcaaattactttttttttaagatcaattactaacaatcaactatcatgctaaatttgctgtgatatcattttgaaccagttaacgtcccaaagaccagaaagacctactgtaagggtaagacctgtcgtaagcacactcaacacaaggttactcaatacaaagctggtaaggcttccttgttcgctcaaggtaagagacgttatgaccgtaaacaatctggtttcggtggtcaaaccaagcctgttttccacaagaaagctaagactaccaagaaggttgttttgagattggaatgtgtcaaatgtaagactagagcccaattaaccttgaagagatgtaagcacttcgaattgggtggtgaaaagaagcaaaagggtcaagctttgcaattctga

SEQ ID NO: 190974 - DNA, 312 bp, Saccharomyces pastorianus
atgtccaattttctctttccatgtaattctactttcttttctgctttagtctctaattcatctagacctggagggggtggtggcggtggtaatgtgaagtccacaatttcttcagcgtttatttcgaagttgcttggaggaggtggtggaggcggaaggaatgtatcctcatttaccgatgatggcaccatcggattatccagttcttcgatttcgtatccaggcggtggtggtggtggtggtggaagtgctaagtcgctgtcctcttcaaaaccaggaggtgggggcggtagtccactcatctttctttga

SEQ ID NO: 190975 - DNA, 1203 bp, Saccharomyces pastorianus
atgccatttgttaaggactttaagccacaagctttgggtgacaccaacttattcaaaccaatcaaaattggtaacaatgaacttctacaccgtgctgtcattcctccattgactagaatgagagcccaacatccaggtaatattccaaacagagactgggccgttgaatactacgctcaacgtgctcaaagaccaggaaccttgattatcactgaaggtacctttccctctccacaatctgggggttacgacaatgctccaggtatctggtccgaagaacaaattaaagaatggaccaagattttcaaggctattcatgagaataaatcgttcgcatgggtccaattatgggttctaggttgggctgctttcccagacacccttgctagggatggtttgcgttacgactccgcttctgacaacgtgtatatgaatgcagaacaagaagaaaaggctaagaaggctaacaacccacaacacagtataacaaaggatgaaattaagcaatacgtcaaagaatacgtccaagctgccaaaaactccattgctgctggtgccgatggtgttgaaatccacagcgctaacggttacttgttgaaccagttcttggacccacactccaataacagaaccgatgagtatggtggatccatcgaaaacagagcccgtttcaccttggaagtggttgatgcagttgtcgatgctattggccctgaaaaagtcggtttgagattgtctccatatggtgtcttcaacagtatgtctggtggtgctgaaaccggtattgttgctcaatatgcttatgtcttaggtgaactagaaagaagagctaaagctggcaagcgtttggctttcgtccatctagttgaacctcgtgtcaccaacccatttttaactgaaggtgaaggtgaatacaatggaggtagcaacaaatttgcttattctatctggaagggcccaattattagagctggtaactttgctctgcacccagaagttgtcagagaagaggtgaaggatcctagaacattgatcggttacggtagattttttatctctaatccagatttggttgatcgtttggaaaaagggttaccattaaacaaatatgacagagacactttctacaaaatgtcagctgagggatacattgactaccctacgtacgaagaagctctaaaactcggttgggacaaaaattaa

SEQ ID NO: 190976 - DNA, 105 bp, Saccharomyces pastorianus
atgccacctgccagaattgaactagcgacctttgcattacaagtgcaacgctctaccactaagctaaggaggctaaaaatacaactatgttgtatctcaaaataa

SEQ ID NO: 190977 - DNA, 183 bp, Saccharomyces pastorianus
atgacgtattgtcatactgacgtatcttattttgagatacaacatagttgtatttttagcctccttagcttagtggtagagcgttgcacttgtaatgcaaaggtcgctagttcaattctggcaggtggcattataccggtattattttttttccctttgttcttatttctctatcatttataa

SEQ ID NO: 190978 - DNA, 2358 bp, Saccharomyces pastorianus
atgtctgttaaagagcataacgaagaagatattattggtgatgaattacagaattcgaggcaactctccattgattgcgactcagttaaaatttcactaaggaacacatattggaccaaagactatacaacaggtatcaaattattcataaaacatatgaagagagaaaatgatttgctgattaaagacatcaaattttacaatgattttgtcaacaaattttggaaaccaacattgaacaatttacaaaaaatggaagcaaccaattcaatgaatagcaggctgctggaagtgatgagcaaacagtttaatataatatcaacagagcaagttgaaagagattgtaaaattccattgcaagaactaagagatcttaatgagagcttccttcgtgaggcagaaaacgatttgtcatctcgttattcagcttacattaaggatttagtcgcagctaaagaggcactaattggatgtgagaaaagagttcagtctatatataaattgaaaaaagccaatacgccagtggaaaattcttcctctgtttttgataatggaaaggatagtgcaccgttaaccaggttgaacttcgtatgcgagtttccttacactttagacgagaggttaaaatttgaggattgcgaccaatttatgtcatttttgcaaaccttgaagggaaaagtcatcctggagaaaagtgtcttttccgttccaggattgtcaaatcaaagtttccaaggcaggtcattgatcaaagaattgaaaaaacttgaacccagactaaacctgtccttatttaatatcgataggataggtaacgaattcatccaactgggtataatacaagaatattccctgagtttttactctagcaaagtttctcagtttgaccaggaaaaatactattactggaacagtgaagtccttgctacgcaagagagtaatggtaatgctggaaacagaaaaaaaaaatcgtatggtgagttaacacactccgacaatgaacacgaagaaaagtccaacgtttcatctatcaaaacatctatatccgattggatccgcaaagttagtcaacatgataatgatgattgcgatgcagcgggaagtacagatatgaataaaaatgagtggaagagtttaaaacagcaacttgaatcatcacaagatatttttttctccaagtgttgccagttggaatattctaaagtgcagttggaaaaaaccatttatgattattgtaaaaattactctaaaatggaggacggaatcaaacgagctctagaatcatcaaacatgatgtttcaacaaaaatgtgaaaaatttactgactcacctgtgtgttctctacaagaagcacaactgccacaggaaactgccaatgcggatgtaagagggtttttcctcagggataatggcataccctttcgcaggtggaatatcctagaagcgagtgatccagtcgacgcttgcaaagaaatctccataaaaagcgaaaagtttttctgtggtagtgaaataaataatgaactggctgctcttgatacgttaggggcaataaagattatactgcggcagattgaaaaggaaccaaatgctaataaagtcatacaaagttggcacagggatattgattttgtaagggtttctaatttgaaaagagacttattgggggaattcaaaggatcgaaaactaccgaaaatacaaactctataatcactgctcatttttttgaaaactcgcacagctatgtcactaatgatctcgtcggactgataaaattatggctgttagagctacccgacagcctaataccttcaaaccactacgatgacttaattaaggccgaaaaatcgctaacatccctatgtgaacagtttccgacgagctccttaaggtttctacaagaactagcaaaccattttcaattgatcaatagcaaatactcacttccgccgcaaacaatacaagatttgtttagagacaacagtgacatagacataccattggcccatcacttcgtaagaagaacaggcttacagaaccctatcgacatcaaaatcttgtcaccaacattatctacatttttcatcaacgaaagaactgtagaaactttgcaaacgttgatcgcaaacaggatcacgacggcaactactgcgacactcactgaaccgccgacgataattataaaggatacaacggcacctatacactctacccctaagccaccgccaaacgacaaggatggccatttcatacctcggccattcaagactagttctactccgacaaccccagagagacctaaacgtaagagtggtttattccttcccatcaacgtcaacgatgtcccttctacataa

SEQ ID NO: 190979 - DNA, 525 bp, Saccharomyces pastorianus
atgtctgctatcccagaaaacgccaacgttaccgtcttaaacaagaacgaaaagaaagccagagaattgattggcaaattgggtttgaagcaaatcccaggtatcatcagagtcactttcaggaagaaggacaaccaaatctatgctattgaaaagccagaagtcttcagatctgccggtggtaactacgttgtcttcggtgaagctaaggttgacaactttacccaaaagctagccgctgctcaacaacaagctcaagctagcggtattatgccatctaacgaagacgtcgctaccaagtccccagaagacatccaagctgacatgcaagccgccgcagaaggcagtgtcaacgccgcagcagaagaagatgacgaagaaggtgaagttgatgccggtgacttgaataaggatgatatcgagttagtcgttcaacaaactaacgtttccaaaaaccaagccatcaaagccctgaaagctcacaatggtgacttagtcaacgctatcatgtccttgtctaaataa

SEQ ID NO: 190980 - DNA, 375 bp, Saccharomyces pastorianus
atgaatatgaaaatgttgctcacgaggatccatgagatgaacgcacttatatcgtctgaattgaacggccgggtggactttttcaagaaccatcgtatgtttattttgagcttagtaaaaatattgttggtctgcaccagcagggaatccctttcagtaatgtatttcaggtttgatagcttttttgattttttgtcgggaggagcatcccttccagttttagactcattagaatatgctcttagcgatgccgctgctattgacggtattctcaagttacttcgaagggcagggcttctagcccaatacacataccttgctacagaaaactgccgggggctccttagaaaaggcctggtaaaaagggacatatag

SEQ ID NO: 190981 - DNA, 1581 bp, Saccharomyces pastorianus
atgacattgactatcaaaataggaaccttaaacgatagcgatcaatctgcagtgcataatggtacagaaaatggctctgattttcgaaagataactcccacagaggaagagatctgtgatgacgtagttttgttatggaaggaagagcccggaactgaagacgctacgattcagcatctttatgacaggattacggaaagaaatcaatcgtggaaattgagtgcttctcgttttcgaaaaattctaaatgagcaccatctttatgacacagatctagagaccgtttctctatataaagataaaatacattttccaaaagccctagattctgatgctaaggtcgaagtgaaatttattgatgacgaacatggaaggggccttttcgctaaaagagatttttccaagggccaaatcatcctgaaagaaaataaacctatcgtatatattccaccactggacaagctttttttaatatctaatggaaaggcatgtgctcgatgtggtaaggcgctatatgatttgacccagcacaaaattatggtccattatttggattgtgaagtttgcaaagctatttggtgcagtgaaaaatgtaaaaaagcacatgcgtcgttacatgagcttttataccactcatggagatcgaatagaatagacattcttcatgctggtaattggaaaagatttgttaactactgtgagaaatattgttttaccgctgccttttcagttggtcttatatatggatccatgcttttggatactacaggagaggtcaaagagcaatggcaaaaattggcaagcatctcacaaagggaaagaattaaattaagagacgccagcggtatcggcagtacgtttagtttactgaatggtacaactgtacatactgaagaggaatctgataatggtaccaaaaagggcgttgagaagaatattgatgacgagactgtttgggagaagtgctacgaattattttgcggtgcatttccaaaagcttctgaagaaatagatttcgagaaatttttgaccatgatcgggacgttcaatatcaatcaatataacggccaggtatatcattggatctccttcataaaccatgattgtgaaccaaacgcctatattgagcaagtagaagaacatgaggaactgaggttgcatgcaaggaaaccaataaagaagggggaacaaatacgtattacgtacgtcaatcccttacatggggtgaggttgaggcgtagggaattaagagttaactggggcttcttatgccagtgtgaccgctgtcaaaatgaactatctacatttgaaagagttccaaatctagagaaaaagaatgcggatgctaatttaggagtagaaaaaatagattccaatgatagtagtgaagatggctctaagaaatcaactggtaatcgtaaatcttccatgagagaggcccagccagatttaaaagaaatactgaagaatggaaaagaatttgaattagacataccagaaactgttgatacacaagggaatgtaagaaaaacctcagtcagattcgattcaaacgtttcggtcgcagtggatgaaagataa

SEQ ID NO: 190982 - DNA, 3228 bp, Saccharomyces pastorianus
atgacaattgcacaccactgcatatttttggtaatcttggcctttctggcactaattaatgtggcctcaggagccacagaggcgtgcttaccagcaggccagaggaaaagtgggatgaatataaatttttaccagtattcattgaaagattcctccacatattcgaatgcagcatatatggcttatggatatgcctcaaaaaccaaactaggttctgtcggaggacaaactgatatttcgattgattataatattccctgtgttagttcatcaggcacatttccttgtcctcaagaagattcctatggaaactggggatgcaaaggaatgggtgcttgttctaatagtcaaggaattgcatactggagtactgatttatttggtttctatactaccccaacaaacgtaaccctagaaatgacaggttattttttaccaccacagacgggttcttacacgttttcttttgcaacagtagatgattctgcaattttatcagtcggtggtagcattgcgttcgaatgttgtgcacaagaacaacctcccatcacgtcgactaacttcacaatcaatggtatcaagccatgggatggaagtctccctgacaatatcacagggactgtctacatgtatgcaggctactattatccgctgaaggttgtttactccaatgccgtttcctggggcacgcttccaattagcgtggaattgcctgatggtactactgttagtgataactttgaagggtacgtttactcttttgacgatgacctaagtcagtcaaattgtactatccctgatccttcaatacatactactagcactatcacaactaccaccgagccatggaccggtactttcacttctacatccactgagatgaccaccatcaccgatactaacggtcaattaactgatgaaactgtcattgtcatcagaactccaacaacagctagcaccatcacaactaccaccgagccatggaccggtactttcacctctacatccactgagatgactactgtcaccggtaccaacggtcaaccaactgacgaaactgttattgtcattagaactccaactagtgagggtttgattactacaactaccgaaccatggaccggtactttcacctctacatccactgagatgactactgtgaccggtaccaacggtcaaccaactgacgaaactgttattgtcattagaactccaactagtgagggtttgattactacaactaccgaaccatggaccggtactttcacctctacatccactgaggttaccaccatcactggtaccaacggtcaaccaactgacgaaaccgtgattgtcattagaactccaactagtgagggtttgattactacaactaccgaaccatggaccggtactttcacctctacatctactgagatgactactgtcaccggtaccaacggtcaaccaactgacgaaactgttattgttatcagaactccaaccagtgaaggtctaatcagcaccaccactgaaccatggactggtactttcacctctacatctactgaggttaccaccatcactggtaccaacggtcaaccaactgacgaaaccgtgattgtcattagaactccaactagtgagggtttgattactacaactaccgaaccatggaccggaactttcacctctacatccactgagatgactactgtgaccggtaccaacggtcaaccaactgacgaaactgttattgtcattagaactccaactagtgagggtttgattactagaactaccgaaccatggactggtactttcacttctacatctactgaggttaccaccatcaccggtaccaacggtcaaccaactgacgaaactgttattgtcatcagaactccaactactgccatctcatccagtttgtcatcttcttcaggacaaatcaccagctctatcacgtcttcgcgtccaattattaccccattctatcctagcaatggaacttctgtgatttcctcctcagtaatttcttcttcagtcacttcttctctagtcacctcttcttcattcatttcttcctctgtcatttcttcttctacaacaacctccacttctatattctctgaatcatctacatcatccgtcattccaaccagtagttccacctctggttcttctgagagcaaaacgagttcggctagttcttcctcttcttcctcttctatctcttctgaatcaccaaagtctcctacaaattcttcttcatcattaccacctgttaccagtgcgacaacaggccaggaaactgcttcttcattaccacctgctaccactacaaaaacgagcgaacaaaccactttggttaccgtgacatcctgcgaatctcatgtgtgtactgaatccatctcctctgctattgtttccacggccaccgttactgttagcggcgtcacaacagagtataccacgtggtgccctatttctaccacagagacaacaaagcaaaccaaggggacaacagagcaaaccaaggggacaacagagcaaaccacagaaacaacaaaacaaaccacagtagttacaatttcttcttgtgaatctgacatatgctctaagactgcttctccagccattgtgtctacaagcactgctactattaacggcgttaccacagaatacacaacatggtgtcctatttccaccacagaatcgaagcaacaaactacgctagttactgttacttcctgcgaatctggtgtgtgttccgaaactacttcacctgccattgtttcgacggccacggctactgtgaatgatgttgttacggtctatcctacatggagaccacagactacgaatgaacagtctgtcagctctaaaatgaacagtgctaccagtgagacaactaccaatactggggctgctgagacaaaaacagcagtcacctcttcactttcaagattcaatcacgctgaaacacagacagcttccgcgaccgatgtgattggtcacagcagtagtgttgtttctgtatccgaaactggcaacaccatgagtctaacaagttccgggttgagcactatgtcgcaacagcctcgtagcacaccagcaagtagcatggtaggatctagtacagcttctttagaaatttcaacgtatgctggcagtgccaacagcttactggccggtagtggtttaagtgtcttcattgcgtccttattgctggcaattatttaa

SEQ ID NO: 190983 - DNA, 234 bp, Saccharomyces pastorianus
atgctggcgaaaacgggcgatgtagtggtacagaaggtgccggttatccgtttgtccgtttttcttcattttttttttgtttttcccttttgtcttttgcaccgcttatatatgggtatgaaacaagttcaagaatttataatggaacccaaaggttcagtctttgtagttcgagcgacattgcgcgtttccttagaaaacgctggaaagatattctttaacgagacggagtaa

SEQ ID NO: 190984 - DNA, 1572 bp, Saccharomyces pastorianus
atggccgccattagagactacaagaccgcactagactttaccaagagcctaccaagaccggatggtttgtcagtgcaggaattgatggactccaagatcagaggtgggttgacttataacgattttttaatcttaccaggtttagtcgattttgcgtcctctgaagttagcctacagaccaagctaaccaggaatattactttaaatattccattagtttcctctccaatggacacggtgacagagtcagaaatggccacttttatggctctgttgggtggtatcggtttcattcaccataactgtaccccagaggaccaagctgacatggtcagaagagtcaagaactatgaaaatgggtttattaacaaccctatagtgatttctccaactacgaccgttggtgaagctaagagcatgaaggaaaagtatggatttgcaggcttccctgtcacgacagatggaaagagaaatgcaaagttggtgggtgtcatcacctctcgtgatatacaattcgttgaggacaactctttactcgttcaggatgtcatgaccaaaaaccctgttaccggcgcacaaggtatcacattatcagaaggtaacgaaattctaaagaaaatcaaaaagggtaggctattggttgttgatgaaaagggtaacttagtttctatgctttcccgaactgatttaatgaaaaatcagaactacccattagcgtccaaatctgccaacaccaagcaactgttatgtggtgcttctattgggactatggacgctgataaagaaagactaagattattggtaaaagctgggttggatgtcgtcatattggattcatcccaaggaaactctatcttcgaattgaacatgctcaagtgggtcaaagagagtttcccaggtctggaagtcatcgctggtaacgttgtcaccagggaacaagctgccaatttgattgctgccggtgcggacggtttgagaattggtatgggaactggctctatttgtattacccaagaagttatggcttgtggtaggccacaaggtacagccgtctacaatgtgtgtgaatttgctaaccaattcggtgttccatgtatggctgatggtggtgttcaaaacattggtcatattaccaaagctttggctcttggttcttctactgttatgatgggtggtatgttggccggtactaccgaatcaccaggtgaatatttctatcaagatggtaaaagattgaaggcgtatcgtggtatgggctccattgacgccatgcaaaagactggtaccaaaggtaatgcatctacctcccgttacttttccgaatcagacagtgttttggtcgcacaaggtgtctccggtgctgtcgttgacaaaggatccattaagaaatttattccatatttgtacaatggtttacaacattcctgtcaagacatcggctgtaggtcgctaactttattaaagaataatgttcaaaggggtaaagttagatttgaattcagaaccgcttctgctcaactagaaggtggcgttcataatttacattcttacgaaaagcgtttacataactga

SEQ ID NO: 190985 - DNA, 462 bp, Saccharomyces pastorianus
atgtccctacggccttgtctaacaccatccagcatgcaatacagtgacatatatatacacacaccacacccacacccacacccacacccacacacacccacacacacacacccacacacacccacacccacaccacacccacacccacacacaccacacccacacaccacacccacacccacaccacaccacacccacacaccacacaccaccctatctaacctgtctcttaacctaccctcacattaccctacctccccactcgttaccctgccccactcaaccataccactcccaaccaccatccatctctctacttactactaccatccaccgcccatcataaccgttaccctccaattacccatatccaactccactaccattaccctgctattaccctaccatccaccatgtcctactcactgtactgttgttctaccctccatattgaaacgttaa

SEQ ID NO: 190986 - DNA, 318 bp, Saccharomyces pastorianus; identical to SEQ ID NO: 190838

SEQ ID NO: 190987 - DNA, 429 bp, Saccharomyces pastorianus
atgcggttaattttcattgcgaaaatgcttcaatattcatttctaccattttccccgttcaatcttttgaattttgataatagtataagcgtaagctggtttataacatactcagtgatcgtttccatttgggggtttgctgtgtggattgaaggagcatataggaataagattaatctacagcttccaagatgtacgaagataaaatgctcccgctacaatacgagaataaaatcccccaagtggttcaactgtaaaaattggatgcattttttcctattatacctttttctaaccgcttctaacttaattgttcaattggcctatttttcaaaagaaatgtgtagtcagggtataaacgttcctggaacgaagaaaccaggtaatagagtttatttatcggttatcatactaatggggaacgggtga

SEQ ID NO: 190988 - DNA, 838 bp, Saccharomyces pastorianus
atggctcaacgtgttactttcagaagaagaaatccatgtatgttactgaactatttttttgagttttcatgaaaacttattatgaacttattatgaacttattttgaactttcattgtgggaaaatgaggttaaaaggcgaacgagtgctatttagagaagcgtaccacttagaaataggaagaaccagatcatcgataggggaatcaactatgcaagaactttcaaatatattggcatgacattaaaacattagacagcatgaacgaacagtatccagtaatgtggacagcaataagttgacttcagtttctaagtggaagaccttggtcgacccaaatggaaaatgaatttttctccgctgttgaaagattgaaatgagataatattcattcagcaacgccgaaatacttttcatatggagcaatcccactcaagttcttaaatcataggataataaagaagtgattactaacattaatgggaaaattttctctttactacgtacagacaacacccgttctaacaaaatcaaggttgttaagaccccaggtggtatcttgcgtgcccaacacgttaagaagttggctactagaccaaagtgtggtgactgtggtagtgctctacaaggtatttccactttgagaccaagacaatacgctactgtctccaagacccacaagactgtttccagagcttacggtggttccagatgtgccaactgtgtcaaggaaagaatcgtcagagctttcttgattgaagaacaaaagattgttaagaaggtcgttaaggaacaaactgaggctgctaagaagtctgaaaagaagtctaagaaataa

SEQ ID NO: 190989 - DNA, 817 bp, Saccharomyces pastorianus
atggtatgtcgaacttgtactgaaccagcagaaattgaaacagactgcaagtaagctctattccggttatagcattatgggtggctgtataaatacaatacaatcacgggagaaatttccaacaaaaaagatctagtgatacgtttggtgccacaagtttaaaatacaaattggttaaaggactttacggctaaaacacaagaattgcaataatgctaatatttattctgtgtattcctcagtaacgtaagatcagcgagaacaaattcccagggttggaaagaataaaaaaaaaagtactgctgtaatgtttctggattatttttctgattaattgttctgtttagattactaacgtattctgctaaaaatgactggtgagctttgcttccattcattttattttttatagtctgacgctgtcactattcgtaccagaaaggttatctccaacccattgttggccagaaagcaattcgttgttgacgtcttgcacccaaacagagctaatgtctccaaggatgaattacgtgaaaaattagctgaagtctacaaggctgaaaaggacgctgtctccgttttcggtttcagaacccaatttggtggtggtaaatctgttggtttcggtttggtctacaactctgttgccgaagctaagaagttcgaaccaacttacagattagtcagatacggtttggctgaaaaggttgaaaaggcttccagacaacaaagaaagcaaaagaagaacagagacaagaagatctttggtactggtaaaagattggccaaaaaggttgctcgtcgtaacgctgattaa

SEQ ID NO: 190990 - DNA, 4498 bp, Saccharomyces pastorianus
atgagctttatggatcaaatcccaggaggaggaaattatccaaaactcccagtagaatgccttcctaacttcccgatccaaccatctttgaccttcagaggtagaaatgactcgcataaactgaaaaactttatctccgaaataatgctaaacatgtctatgatatcttggccgaatgatgccagtcgtattgtgtactgcagaagacatttattaaaccccgctgctcagtgggctaatgattttgtacaagaacaaggtatacttgaaataacattcgacacattcatacaaggattatatcaacatttctataagccaccagatatcaataaaatctttaatgcaatcacgcaactttccgaagctaaacttggtattgagcgtctcaaccaacgattcagaaagatttgggacagaatgccaccagacttcatgaccgaaaaagctgccataatgacatatactaggctattgacaaaggaaacctataatattgtcagaatgcacaaaccagagacattaaaagacgccatggaagaggcttaccagacaaccgcactaactgaaagattcttcccaggattcgaacttgatgctgatggagacactatcatcggtgccacaacccacttacaagaagaatacgactctgactatgattcagaagataatctgacccagaatagatacgtccacaccgtaaggacaagaagatcttacaataaaccaatgtcaaatcatcgaaacaggagaaataacaacgcatccagagaagaatgtataaaaaatcggctatgcttctattgtaagaaagagggacatcgcctgaacgaatgtagagcacgtaaggcgagttctaaccgatcttgaactcgaatcaaaagaccaacaaactctttttatcaaaaccttaccaattgtacactatatcgccatccccgagatggacaataccgccgaaaaaaccataaaaatacaaaacacgaaagtaaaaaccctgtttgacagtggatcacccacgtcatttatccgaagagatattgtagaacttctcaaatacgaaatctacgagacccctccactccgttttagaggattcgtagccaccaaatccgccgttacatccgaagcagtcaccattgacctcaaaatcaatgacctgcagataactttagccgcgtacatactggataacatggactaccaattgttaattggaaatccaatcttacgccgctacccgaaaatcctgcacacagtactgaataccagagagagccccgactccttaaagcccaagacttatcgctccgaaaccgttaataacgttagaacctactccgctggtaatcgtggtaaccccagaaacataaaactgtcttttgcccccaccattctcgaagcaactgacccgaaatccgctggtaatcgtggtaaccccagaaacacaaaactgtctcttgcccccaccattctcgaagcaactgacccgaaatccgctggtaatcgtggtgactccagaaccaaaaccctgtctcttgcaaccactactcctgcagcaattgacccgcttacgacccttgataacccaggtagtactcaaagtacatttgcgcaattcccgatacctgaagaagcgagcatcctagaagaggatggaaaatactccaacgttgtctcaaccattcagagtgtagaacctaatgctactgatcacagcaataaggacaccttttgcactttgccagtttggttacaacagaagtatagagagatcatacgtaatgatctcccaccaagacctgccgacattaacaacatccccgtaaaacatgatattgaaattaaacctggcgcaagactacctcgactacagccataccatgttacagaaaagaatgaacaagaaatcaacaaaatagttcaaaaactgctcgataacaagttcattgttccctcaaagtcgccctgcagctcccctgtagtcctcgtcccgaagaaagacggtaccttccgactctgcgtcgattaccgcaccctgaacaaagctaccatctccgacccattcccattacccagaatcgacaacctattgagccgtattggaaatgcccagatatttaccacgctagatttgcatagtggttaccaccagatcccgatggaacccaaagaccgctacaaaaccgcctttgtcaccccatccggtaagtatgaatataccgtcatgccatttggcttagtcaatgcacctagtacattcgcaagatacatggctgatacatttagagacctgagattcgtcaatgtttaccttgatgatatattaatcttctccgaatctccagaagaacattggaaacatttagacacggtactagaaagattaaagaacgagaacctcattgttaagaagaaaaaatgtaaatttgcatctgaagaaactgagtttttaggctatagtattggaatccagaaaatagctccactacagcacaaatgtgcagcaatccgagactttccgacgcctaaaacagtaaaacaagcacagagatttttaggaatgattaattactacagacgattcattccgaattgctccaagattgcacagccaatccaactgtttatttgtgacaaaagtcaatggacagaaaaacaagacaaggcaattgagaaactaaaagccgccttgtgtaactcccccgtcctagtaccattcaacaacaaagcaaactaccgacttacaacagacgcctcaaaagacggcattggtgctgttctagaagaagtcgacaacaagaacaaacttgttggtgtcgtcggttacttctctaaatccttagagagtgcccagaaaaactatcctgctggcgaattagaactacttggaattatcaaagcactccaccacttccgatatatgcttcacggaaagcatttcacgttaagaacagaccacattagtttgttatcattacaaaacaagaacgaacccgcacgacgcgtgcaacgctggttagatgacctagccacatatgacttcaccttagaatacttagctggacccaagaacgttgtcgcagatgccatatcccgtgccatatatactataacccccgaaacatcccgacctatcgacacagaaagctggaaatcttactacaaatcagacccattatgtagtgctgtcttaattcatatgaaagaattgacacaacacaacgtcacacctgaagatatgtcagccttccgtagttaccagaagaaactcgaactatcagagaccttccgaaagaattattccctagaagacgaaatgatctattaccaagaccgactagtagtaccaataaaacaacagaacgcagttatgagactgtatcatgaccataccttatttggaggacatttcggtgtaacagtgacccttgcgaaaatcagcccaatttactattggccgaaactacaacattcgatcatacagtacatcaggacctgcgtacaatgtcaactaataaaatcacaccgtccacgcttacatggactattgcaaccactccccatagcagaaggaagatggcttgatatatcaatggattttgtgacaggattacccccaacatcaaataacttgaatatgatcctcgtcgtagttgatcgtttctcgaaacgcgctcacttcatagctacaaggaaaactttagacgcaacacaactaatagatttactctttcgatacattttttcatatcatggttttcccaggacaataaccagtgatagagatgtccgtatgaccgccgacaaataccaagaactcacgaaaagactaggaataaaatcgacaatgtcttccgcgaaccacccccaaacagatggacaatccgaacgaacgatacagacattaaacaggttactaagagcctatgtttcaaccaatattcagaattggcatgtatatttaccacaaatcgaatttgtttacaactctacacctactagaacacttggaaaatcaccatttgaaattgatttaggatatttaccgaatacccctgctattaagtcagatgacgaagtcaacgcaagaagttttactgccgtagaacttgccaaacacctcaaagcccttaccatccaaacgaaggaacagctagaacacgctcaaatcgaaatggaaactaataacaatcaaagacgtaaacccttattgttaaacataggagatcacgtattagtgcatagagatgcatacttcaagaaaggtgcttatatgaaagtacaacaaatatacgtcggaccatttcgagttgttaagaaaataaacgataacgcctacgaactagatttaaactctcacaagaaaaagcacagagttattaatgtacaattcctgaaaagtttgtataccgtccagacgcgtacccaaagaataaaccaatcagctccactgagagaattaagagagcacacgaagttactgcactcatag

SEQ ID NO: 190991 - DNA, 821 bp, Saccharomyces pastorianus
atgcaaatgtatgcaccatatccattctaaacatagtttttcgaacgttcagagcttaaagggacaattattttagaaactgaatttttacccagtggaataacatcgtatctgtaaagtctacaaaattttttatccatcaaaaattaaaacaaagaaaactgccaaactgaatatgaggaactttcctctctaggaatgacttagtgaatgtacagtgacttgtggaaaatatgattagattttgagcgggtgatgcgacttaacagtctcattgcctaagaaatatccaaatttgtggttcatgctctcccccaagatatgacgatgagagctcgtttaaaattttgtcttcttccgaacagttatgaaaaaactattacgtgtttttatgatatccttactaacttgtcatttttttataaaattatttttttaacagttttgtcaagactttgactggtaagaccatcactttggaagttgaatcttctgacactattgacaatgtcaagtcaaagattcaagacaaggaaggtatcccacctgaccaacaaagattgatctttgctggtaagcaattggaagacggtagaaccttgtctgactacaacattcaaaaagaatccactttgcacttagtcttgagattgagaggtggtatcattgaaccatctttgaaagctttggcttccaagtacaactgtgacaaatctgtttgccgtaagtgttatgctagattgccaccaagagctaccaactgtagaaagagaaagtgtggtcacaccaaccaattgcgtccaaagaagaagttaaaatga

SEQ ID NO: 190992 - DNA, 360 bp, Saccharomyces pastorianus
atgaaaaatattgcatacgaaggtcgtctattcttgattagtgcagtgcagttcatgccagatgcgacagcaatgggctttggggagattattgaccaagctacaggtaagagaaaattacctggatggccatctgctgacgacaactgtattaatggaggtagtgttattattgatccttatggagagattattgcagggccattgctagggcaggagggccttttaaccgccgaaattaacactgacttgattgctgaagctcgctttgatcttgaccctgtcggacattatgctaggggagatgtcttccagttgactgtcaatgaaaggtcacacgatgtcaagtttacgaaatga

SEQ ID NO: 190993 - DNA, 330 bp, Saccharomyces pastorianus
atgtccggtgttaataatacatccgcaaatgatttatccactaccgagtctaactctaactcagcagtaggcgctccttctgttaagactgagcacggtgactccaaagactccctcaaccttgatgctactgaagcacctattgacttacctcaaaaacccctctctgcatataccaccgtcgcaatcctatgtttgatgattgcatttggcggtttcatctttggttgggataccggtaccatttctggttttgttaacctttctgactttatcagaaggtttggtcaaaaaaaaacgacaaggggacttactacttatcgaaagtaa

SEQ ID NO: 190994 - DNA, 228 bp, Saccharomyces pastorianus
atgccaattataggggtgccgaggtgccttgaaaaacccttttgcgcgcctgcgaagtttccattttcggtcaaaaagaatatccgaattttagatttggaccctcgtacagaagcctattgtctaagcctaaattcagtctgctctaaacggcttccatgcaagaaatatttctatctcttgaattcgtacaacattaaacgtgtgttgggagtcgtatactgttag

SEQ ID NO: 190995 - DNA, 363 bp, Saccharomyces pastorianus
atggtcaaattaacttcaatcgctgctggtgtcgctgccatcgctgctactgcttccgcaaccaccactctagctcaatctgacgaaagagtcaacttggttgaattgggtgtctacgtctctgatatcagagctcacttggcccaatactacatgttccaagccgcacacccaactgaaacctacccagtcgaagttgctgaagccgttttcaactacggtgacttcaccaccatgttgactggtatttctccagaccaagtgaccagaatgatcaccggtgtcccatggtactccagcagattaaagccagccatctccagtgctctatccaaggacggtatctacactatcgcaaactag

SEQ ID NO: 190996 - DNA, 138 bp, Saccharomyces pastorianus
atgcctagtgattatacttcccattacccagtaatacttatcaaaaaaaaaaaaaaaaaaattgcaggaatgtataggcatagtaagcggtaccttgagataatgtccaccgcttcagctcaattcgtcggaaactaa

SEQ ID NO: 190997 - DNA, 375 bp, Saccharomyces pastorianus
atggtcaaattaacttcaatcgctgctggtgtcgccgccatcgctgctggtgttgccgctgccccagccactaccactctatctccatctgacgaaagagttaacttggtcgaattgggtgtttacgtctccgatatcagagctcatttggcccaatactacttgtttcaagcagctcatccaagtgagacctacccagttgaaattgctgaagctgttttcaactatggtgacttcaccaccatgttgactggtattccagctgaacaagtcaccagagttatcactggtgttccatggtactctaccagattgagaccagctatctccagtgctctatctaaggacggtatttacactgctattccaaaatag

SEQ ID NO: 190998 - DNA, 711 bp, Saccharomyces pastorianus
atggcgaatttaaatatatttgggcaagaagttggtgctgacgtcgaaggttggacaacaagggccttcccagagaaagttgtattgaaaggtaacacttgcagactagaacctctagatagagaaagacatggttcggaactttttagtgcctatagtgaggcaggccaaaaattatggacgtatttacctgcgggaccattcactaacttggaggaatatctagaattcattaaggaactcaatgaaactaaagatactgtgcctttcgcaattattaataaagagactgaacgtgccgttggtacattgtgcttaataagaatcgatgaagccaacggttcactagaagttggatatgttgttttttcaccagaattacagaagacgattattgcaactgaagctcaatttctgttaatgaagtatgtatttgatgatcttcaatacaggagatatgagtggaagtgtgatagtttaaatgggccgtcaaggagggcagcgatgcgcttaggctttaagtatgaaggcacgtttcgacaagtggtggtatataagggtcgcactcgcgacactcaatggttttcaataatcgataaagaatggttacgcattcgtaaaacctttgaagaatggttagacaaaacaaattttgaaaatggcaaacaaaagagaggaatagcagcaataagagaaagcttgtcaaactga

SEQ ID NO: 190999 - DNA, 693 bp, Saccharomyces pastorianus
atgggctgccaagaagcgttcagaacaacccttctcgaacccttctctttgaaaaaagacgaagctgccaaggttaagtcatttaaggattccgtctcttacattgaagaagcattgggagtttattttacagaagttgaaaaacaatggaagttgtttaatactgaaaaatcatggagccctgttggcctagaagatgctaaacttcccaaagaagcttaccgatttaagcttacctggattcttaaaaggattttcaagctgcggtgtttacaagtcttcctttattattttttaattgtctacacgtctggaaatgttgaccttatatcacgtttcttgtttccggtagtaatgttttttatcatgacgagagatttccaaaatatgggaatgattgttttatccgttaaaatggaacacaagatgcagttcttgtcaactattataaatgagcaagaaagcggtgcgaatggatgggacgaaattgcaaagaaaatgaataggtatttgtttgagaaaaaagtctggaataatgaagagtttttctacgatggacttgactgtgaatggttttttagctgctttttctatcgccttttatctttaaaaaaaactatgtggtttgcttcgttgaacgttgagctatggccatacgttaaagaagcacaatccgtggtaacaagtctttag

SEQ ID NO: 191000 - DNA, 186 bp, Saccharomyces pastorianus
atgaaagagaatgaagtcaaagatgagaaaagcgtagatgtgttatccttcaaacagctcgaatcccaaaagactgttttaccccaggatgttttccgaaacgaattgacctggttttgttatgaaatttacaagtctttagcgtttcgcatctggatgctattatggctaccacttagcatctga

SEQ ID NO: 191001 - DNA, 198 bp, Saccharomyces pastorianus
atgattggctccattgggttctttattacttccttggctgtgttgatacgtactgttatggtttatgccaagagagtggtaaacattagactaaagagagcagtagattatgaggataagatcgggcccggcatggtttctgtgtttctaattctctctattttattttcctttttctgcaacctagttgctaaatga

SEQ ID NO: 191002 - DNA, 1605 bp, Saccharomyces pastorianus
atgcaagctccagtggtatttatgaatgcttctcaagagagaactaccggtcgtcaggcccaaatctccaatatcactgctgcaaaggcagttgccgatgtcattcgaacttgcttaggtccaaaagctatgttaaagatgttattggatcctatgggcggtcttgtgttgactaacgatggccacgctattttaagggaaattgatgttgcacatccagcagctaaatcaatgttggagttatcccgtactcaagacgaagaggttggtgacgggactacaacagttattattctagctggtgagattttagctcagtgtgcaccttatttgattgaaaaaaatattcaccctgttattattatccaagccttgaagaaagcactgactgatgcactagaagttatcaaacaagtaagtaaacctgtcgatgtggaaaatgatgccgctatgaaaaaattgattcaagcctctatcggtactaaatatgtcatacattggtcagagaaaatgtgtgaattagctctagacgctgttaagactgtccgtaaagacctgggacaaactgtggaaggtgaacctaattttgaaatcgatatcaaaagatatgtccgtgtggagaagattcctgggggggatgttctagattctcgcgtcttaaagggtgtcttattgaacaaggatgttgttcatccaaagatgtcccgtcacatagagaatccacgtgttgttcttttggattgtccactagaatataagaagggtgaatctcaaaccaacatagaaattgaaaaggaggaagattggaataggattttacaaatcgaggaagaacaagttcagctaatgtgtgaacaaattttagccgttaggccaacactagtcatcactgaaaaaggtgtttcagatctagcacagcattatttactaaagggtggatgtagtgttttaagaagagtgaagaaatcagacaataatagaattgctcgtgtaactggtgcaaccattgtcaatcgtgtagaggacttgaaggaaagtgatgtcggtacaaactgtggattattcaaagtagaaatgattggggacgaatatttctcatttttggataactgcaaggaaccaaaagcttgtaccataatgttacgtggtggttccaaagatatattaaacgaaatagatcgtaacctacaagatgctatggctgttgctcgtaatgtgatgttgagtccttccttgtccccaggtggtggtgccaccgagatggcagtttctgtcaaattagcagaaaaggcaaagcaattagaagggatccagcaatggccataccaagctgtagctgatgctatggagtgtattccacgtactttgatacaaaatgcaggtggtgatcctattagactcctatcccaactaagagccaaacacgcacagggaaattttacaacaggtattgatggtgacaaggggaaaattgtagatatggttagttacggtatttgggaacctgaagtcatcaagcagcaaagtgtcaaaaccgctattgaaagtgcatgtttactattaagggttgatgatattgttagtggtgtaagaaaacaagaataa

SEQ ID NO: 191003 - DNA, 258 bp, Saccharomyces pastorianus
atggttttgaatccgtccaagtaccaagacacccgcacgtggaagatgacgcctgccatgatcagggcccgtaaaccctttttcaaaggcaatatgctcggtctcacgctgctgctgggtgtcacgggctctgtttactactacacatatcattttctgcacaaggacaacgactttgcagacgtgcccattccacccatcgatccgcaggagctcgaggctctcaaaaaggagtacgaagccaagaagaaggcatga

SEQ ID NO: 191004 - DNA, 724 bp, Saccharomyces pastorianus
atggaaaacgataagggtcaattagtacgtaaattatagcagatgatggcgcgcaaaggaagaaagaagaggactgagtaagcgtggacagacaagggagcatcgacagaaaaataaaattataataagttaagtgtgcaagattagtggtacaaatagggtgggaccaacatgggtttataatcatattggttagtaatacatcaaattcaagaaaatgcaaataacccatttaaattggcacaagtgttacctgatactttatcatgtgtggtctaagtacacatctctaagaaatgtggcgttttaacgacaaaattggaatcccaagagagatatgctgaaaagacatcataattccgaattagtgggtttccatattccagaactactcttagaacttttctttcattcatgtgcagaataattttacaagaatataagcgcaaatgtactaacattgaataatttctttttttactaggttgaattatatgttccaagaaagtgttctgctaccaacagaatcatcaaagccgatgaccacgcttctgttcaaatcaacgttgccaaggttgatgaagaaggccgcgccattccaggtgaatacatcacttacgctttgtccggttacgttagatccagaggtgaatccgatgactctttgaaccgtttggctcaaaacgatggtttgttgaagaacgtttggtcttactcccgttaa

SEQ ID NO: 191005 - DNA, 513 bp, Saccharomyces pastorianus
atgtttttaacgtcaccatttgaatcctgtattgtgctgtcttccttaatagcaggcttattgttttcattgtctaccgggttcgtaggtatactaggagtgtttgcctcattgttcgaaacagaactctcggtttcgccaaagagattatcactatcctcattatcttggccaaagacgttctgggccctgctttcttctgtagaaggtgtttcctgggaatctagcttattcgcttgcatagtcggctgctgctttgccgttaccgttatcgcctcactttctgcatcgcgtgtgttcggaacagttgcttcatccttcagagactcatcttgttgctgcgattcttcaccagcagtatctgtattggcaacccctgccacagctgcattagcgttgctatcactattgttgtcattgccatgttggtccacgtccacggaagcgtttaccgtggacccctcacccagtgtattctccatgcttgcaaaccgtatcacaattggtctctga

SEQ ID NO: 191006 - DNA, 138 bp, Saccharomyces pastorianus
atgaagatgttcttgtttttgaacgaatcatacatctttgatagacttcgtatgtggagtattgttttatggcactcatgtgtattcgtatgcgcagaatgtgagaatgccaattataggggtgccgaggtgccttga

SEQ ID NO: 191007 - DNA, 735 bp, Saccharomyces pastorianus
atgtcttcacaagatgttctgatacattcagatgatccgtgccatccagcaaatctcatttgcacgctatgcaagcagttttttcataataattggtgcaccggaactggaggtgggatttcaataaaagatcctaacacgaattattattatctcgccccatctggggtgcagaaggagaagatgatacctgaggatttgtttgtcatggacgctcagacattagagtatttgcgctctcccaagctttacaagccaagcgcatgtactccattgttcttagcgtgctaccaaaagaaaaatgcaggtgctataatacatacacactcccaaaatgctgtgatatgctccttgctatttggcgatgagttcaggattgctaacatcgaacaaatcaaagcaattccaagcggaaaggtggaccctgtgaccaagaaacccatggcgctatcgttttttgatacgctgaagattcccatcattgaaaacatggcgcatgaggacgagttgatcgatgacttgcacaagacttttaaagattatccagacacatgcgccgtaattgtgaggagacatggcatttttgtttggggtccgacaatcgataaggccaaaattttcaacgaagccatcgattatttgatggagctggccataaagatgtaccaaatggggattcctcccgactgtggcattggcgaagagaagaagcatctgaagatggccagtccgtga

SEQ ID NO: 191008 - DNA, 5269 bp, Saccharomyces pastorianus
atggaatcccaacaattatctcaacattcacatatttctcatggtagcgcctgtgcttcggttacttctaaggaagtccacacaaatcaagatccgttagacgtttcagcttccaaaacagaagaatgtgagaaggcttccactaaggctaactctcaacagacaacaacacctgcttcatcagctgttccagagaacccccatcatgcctctcctcaacctgcttcagtaccacctccacagaatgggccgtacccacagcagtgcatgatgacccaaaaccaagccaatccatctggttggtcattttacggacacccatctatgattccgtatacaccttatcaaatgtcgcctatgtactttccacctgggccacaatcacagtttccgcagtatccatcatcagttggaacgcctctgagcactccatcacctgagtcaggtaatacatttactgattcatcctcagcggactctgatatgacatccactaaaaaatatgtcagaccaccaccaatgttaacctcacctaatgactttccaaattgggttaaaacatacatcaaatttttacaaaactcgaatctcggtggtattattccgacagtaaacggaaaacccgtacgtcagatcactgatgatgaactcaccttcttgtataacacttttcaaatatttgctccctctcaattcctacctacctgggtcaaagacatcctatccgttgattatacggatatcatgaaaattctttccaaaagtattgaaaaaatgcaatctgatacccaagaggcaaacgacattgtgaccctggcaaatttgcaatataatggcagtacacctgcagatgcatttgaaacaaaagtcacaaacattatcgacagactgaacaataatggcattcatatcaataacaaggtcgcatgccaattaattatgagaggtctatctggcgaatataaatttttacgctacacacgtcatcgacatctaaatatgacagtcgctgaactgttcttagatatccatgctatttatgaagaacaacagggatcgagaaacagcaaacctaattacaggagaaatctgagtgatgagaagaatgattctcgcagctatacgaatacaaccaaacccaaagttatagctcggaatcctcaaaaaacaaataattcgaaatcgaaaacagccagggctcacaatgtatccacatctaataactctcccagcacggacaacgattccatcagtaaatcaactactgaaccgattcaattgaacaataagcacgaccttcaccttaggccaggaacttactgaatctacggtaaatcacactaatcattctgatgatgaactccctggacacctccttctcgattcaggagcatcacgaacccttataagatctgctcatcacatacactcagcatcatctaatcctgacataaacgtagttgatgctcaaaaaagaaatataccaattaacgctattggtgacctacaatttcacttccaggacaacaccaaaacatcaataaaggtattgcacactcctaacatagcctatgacttactcagtttgaatgaattggctgcagtagatatcacagcatgctttaccaaaaacgtcttagaacgatctgacggcactgtacttgcacctatcgtacaatatggagacttttactgggtatctaaaaggtacttgcttccatcaaatatctccgtacccaccatcaataatgtccatacaagtgaaagtacacgcaaatatccttatcctttcattcatcgaatgcttgcgcatgccaatgcacagacaattcgatactcacttaaaaataacaccatcacgtattttaacgaatcagatgtcgactggtctagtgctattgactatcaatgtcctgattgtttaatcggcaaaagcaccaaacacagacatatcaaaggttcacgactaaaataccaaaattcatacgaaccctttcaatacctacatactgacatatttggtccagttcacaacctaccaaaaagtgcaccatcctatttcatctcatttactgatgagacaacaaaattccgttgggtttatccattacacgaccgtcgcgaggactctatcctcgatgtttttactacgatactagcttttattaagaaccagtttcaggccagtgtcttggttatacaaatggaccgtggttctgagtatactaacagaactctccataaattccttgaaaaaaatggtataactccatgctatacaaccacagcggattcccgagcacatggagtcgctgaacggctcaaccgtaccttattagatgactgccgtactcaactgcaatgtagtggtttaccgaaccatttatggttctctgcaatcgaattttctactattgtgagaaattcactagcttcacctaaaagcaaaaaatctgcaagacaacatgctggcttggcaggacttgatatcagtactttgttacctttcggtcaacctgttatcgtcaatgatcacaaccctaactccaaaatacatcctcgtggcatcccaggttacgctctacatccgtctcgaaactcttatggatatatcatctatcttccatccttaaagaagacagtagatacaactaactatgttattcttcagggcaaggaatccagattagatcaattcaattacgacgcactcactttcgatgaagacttaaaccgtttaactgcttcatatcaatcgttcattgcgtcaaatgagatccaagaatccaatgatcttaacatagaatctgaccatgacttccaatctgacattgaactacatcctgagcaaccgagaaatgtcctttcaaaagctgtgagtccaaccgattccacacctccgtcaactcatactgaagattcgaaacgtgtttctaaaaccaatattcgcgcacccagagaagttgaccccaacatatctgaatctaatattcttccatcaaagaagagatctagcaccccccaaatttccaatatcgagagtaccggttcgggtggtatgcataaattaaatgttcctttacttgctcccatgtcccaatctaacacacatgagtcgtcgcacgccagtaaatctaaagatttcagacactcagactcgtacagtgaaaatgagactaatcatacaaacgtaccaatatccagtacgggtggtaccaacaacaaaactgttccgcagataagtgaccaagagactgagaaaaggattatacaccgttcaccttcaatcgatgcttctccaccggaaaataattcatcgcacaatattgttcctatcaaaacgccaactactgtttctgaacagaataccgaggaatctatcatcgctgatctcccactccctgatctacctccagaatctcctaccgaattccctgacccatttaaagaactcccaccgataaattctcatcaaactaattccagtttgggtggtattggtgactctaatgcctatactactatcaacagtaagaaaagatcattagaagataatgaaactgaaattaaggtatcacgagacacatggaatactaagaatatgcgtagtttagaacctccgagatcgaagaaacgaattcacctgattgcagctgtaaaagcagtaaaatcaatcaaaccaatacggacaaccttacgatacgatgaggcaatcacctataataaagatattaaagaaaaagaaaaatatatcgaggcataccacaaagaagtcaatcaactgttgaagatgaaaacttgggacactgacgaatattatgacagaaaagaaatagaccctaaaagagtaataaactcaatgtttatcttcaacaagaaacgtgacggtactcataaagctagatttgttgcaagaggtgacattcagcatcctgatacgtacgatacaggtatgcaatccaacactgtacatcattatgcgttgatgacatccctgtcacttgcattagacaataactactatattacacaattagacatatcttcggcatatttgtatgcagacatcaaagaagaattatacataagacctccaccacatttaggaatgaatgataagttgatacgtttgaagaaatcacattatggattgaaacaaagtggagcgaactggtacgaaactatcaaatcatacctgataaaacagtgtggtatggaagaagttcgtggatggtcatgcgtatttaagaatagtcaagtaacaatttgcttattcgttgatgatatgatattgttcagcaaagacttaaatgcaaataagaaaatcataacaacactcaagaaacaatacgatacaaagataataaatctgggtgaaagtgataacgaaattcagtacgacatacttggcttagaaatcaaatatcaaagaggtaaatacatgaaattaggtatggaaaactcattaactgagaaaatacccaaattaaacgtacctttgaatccaaaaggaagaaaacttagcgctccaggtcaaccaggtctttatatagaccaggatgaactagaaatagatgaagatgaatacaaagagaaggtacatgaaatgcaaaagttgattggtctagcttcatatgttggatataaatttagatttgacttactatactacatcaacacacttgctcaacatatactattcccctctaggcaagttttagacatgacatatgagttaatacaattcatgtgggacactagagataaacaactgatatggcacaaaaacaaacctaccgagccagataataaactagtcgcaataagcgatgcttcatatggtaaccaaccatattacaagtcacaaattggtaacattttcctactcaacggaaaagtgattggaggaaagtcgacaaaggcttcattaacatgtacttcaactacggaagcagaaatacacgcgataagtgaatctgtcccattattaaataatctaagttacctgatacaagaacttaacaagaaaccaattattaaaggcttacttactgatagtagatcaacgatcagtataattaagtctacaaatgaagagaaatttagaaacagattttttggcacaaaggcaatgagacttagagatgaagtatcaggtaataatttatacgtatactacatcgagaccaagaagaacattgctgatgtgatgacaaaacctcttccgataaaaacatttaaactattaactaacaaatggattcattag

SEQ ID NO: 191009 - DNA, 1182 bp, Saccharomyces pastorianus
atgattcaagatccccttgtatatttagacatctccattgataaaaaaccaattggtcgtattgtctgcaaactttttcgtgagaaggctcctaaaacaacagagaatttttataagttatgcgctggtgatgttaagagtcctttgaaggatcaacagtacctgagctataagggaaatggttttcatagagtcgttaagaattttatgatccaggcaggtgacattgtctttgggacacaaaaggattcctcttcatcgtctgttggaaaaggtggatgttcaatttacgctgataaagaggaagtgaaaaccgatgatgaatctttctgttacgggaattttgaagacgaaaacttgggagagtttgtagaaccctttaccttaggtatggccaatttaggttctccaaatacgaacaattcccagtttttcataactacatacgccgcacctcatttgaacggcaagcattctatttttgggcaggtggttcatggaaaatcagtggttcgcactatagaaaactgcagggtagattctgatggagtccctgaatcagacgttagaatcagcgactgtggagtgtgggaaaaaactatgggtgtcccgctttacaacgcttctaatgaccaaattggcggtgacgtatacgaagaatatccagacgatgatacacatttcggtgacgatgattttggtaaggctcttgaggctgctaatataatcaaagaatctgggacgctcttatttaagaaaaaggattactctaatgcctttttcaaatacagaaaatctttaaattatatcaatgaatacatgcctgaacccgacgtagacaaagaaagaaacatccaatttattaacctaaagatgaaaatttacctaaatttatctttggtgctctttaatctggaaagatacgatgatgctatcatgtatgctacgtatttattggagatggataacgttcctaacagagatcaagcaaaggcttattatagaagaggtaacagttacttaaaaaaaaagagactagacgaagctttacaagattatattttttgtaaagagaaaaatcccgatgacgaagttatagaacaaagaatagaatatgtcaataggctcatagaagagaataaggaaaagacaagaaagaatatatcaaagtttttctcctaa

SEQ ID NO: 191010 - DNA, 1698 bp, Saccharomyces pastorianus
atgtatcgcagtagaaaccgaccaaaaagaggtggagaaaatgaagttaagggaccaaattctgccttgactcaatttttaagagaagaagggatcagtgctgaaaatatcaaacaaaaatggtaccagcgacagtcgaagaagcaagaagatgcaacagacgaaaaaaaaggtaaagcggaggatgatagctttactgccgagatatctcgagtagttgaagatgaagaaattgatgaaattggaacaggtagtggtaccgagacagaaagagctcaggtttcctacgatgccaggatgaaattagtccctgctgatagtgatgaagaagaatatgaaactagccacatttctgacacgccagtcagtttaagttcggctaatgaccgggaatcattgactaaaaaaaggcaaaatactgcaaaaattatccaaaatcgtcgcagaaagcgtaaaagagcagctgacctattggatagacgcgtcaacaaagtatccagcttacaaagtctttgtattacgaaaattagtgaaaatatatccaagtggcaaaaagaggctgatgaatcatcaaagttggtatttaacaaattgagagatgtccttggtggcgtatcaaccgctaatttgaataatttggcaaaagcactatcgaagaatagggccctgaatgatcatactctgcaacttttcttgaagacagatctaaaaaggttaactttcagcgattgttctaaaatttcatttgatggttacaaaacgctagccattttttcgccacacctaaccgaattatccctacaaatgtgtgggcagttgaaccatgaatcattgctttacattgctgaaaagcttccgaacttgaaatcactgaatttagatggaccatttctgatcaacgaggacacatgggagaagttctttgtaataatgaaaggtagattagaagagttccacatttctaatacgcaccgcttcaccgacaaatcattatctaatttattgatcaactgcggttctaccttggtatccttagggttatccagactagattctatatcaaattacgctttattaccgcagtacctagtcaacgacgaatttcacagtctctgtattgaatatccattcaatgaagaggatgttaacgatgagatcatcataaatctgctaggtcaaatcgggcgcacgttacgtaaattggttttgaatggctgtattgacttgacagattcaatgataatcaatggtctgactgcattcattcctgagaaatgtccattggaggtattgagcttggaagaatcagatcagatcactacagattcactgtcgtactttttcagcaaagtagaactgaataatttgattgaatgcagctttagaagatgtctacaattgggcgatatggcaattatagagctattgcttaacggagcaagagatagtctgagaagcttaaatctcaattcattaaaagagctaactaaggaggcatttgtggcgttagcctgtcctaatctgacgtatcttgatcttggttttgtacgttgtgttgatgactcggtgattcaaatgttgggtgagcaaaatccgaatttaactgtaattgatgttttcggagacaatttggttactgaaaaggccacaatgaggcctggacttacgttgatagggagacagagtgacagtatataa

SEQ ID NO: 191011 - DNA, 1725 bp, Saccharomyces pastorianus
atgtcaattaggcctctcacgttaaacggtttagatgagccagaaacctcttttgaagaactgaatacaactctacctcgctttcaatcccatgaaacattaactttggaagaaaacgtgccaccattgagtacatcaacttatataccgcctccatcctcggtaggtacttctgacactggcacggtattttccaatagtaccagcgcgttttggtctaataagcaagcagacgatgatcaggacatggaggtagaccaggatgatgaatttctaaatgacttccaggaattccaaaataaaaaggatgattttgacgatgctattaaaacaaattttcatttgagaaatggatgtcgaactggccctttcaaaaacgacattttcgcagaagagtttgatagaaaactgagtttggaagataaaccaaggctaaagcaacctagatcaatgatggaattgaaaccaaaaagaaaactatcaaatagcgtcacttcaagaaacttaaggtctggtaattctgtaagatttaagaaatctatgcctaacttagctttagttaatccagctatcagagaagaagaagaggacgaagaacgagaaagagaagatcaacgagagtttaattacaagattgataacgatacgcaggacacaattttggcgaaattcagttcagatgatgaaggtgactttctgacaggatttgaagaattagagggtgaagcaattgatgaaacgatttcttcgaacgataaagaaagtgccgaccatccgcgtttcttaaagaagtcatcctcatctttgccattaaaaatatcacctgcacaatatgatatagtaaagcatgacgaattattaactccaggtcttcataggcgacaacgagattggaatacccagcaggaactggactcttttaaagaaaaacgatcagtaagacactgttctaatcaaaatgtacaactcaatggtccagctaaaatcaaaacaataaaacagcaaattgatcataatactccaatgaagaaaggttctatgatatataacccgaaaactatgaagtgggaaggaaatgaaaacgtcttaagcaaatttagtgatgtagacacggcaaacaggaaagctttattgataaaaaacaagctacaacgagatgcagattctaagaagcaaaaatattctgatctacagcatgcaagagccacttcgagaaatcaaaaggtcatcgggaacatgattttagatgaacaaaatttaagatgggttagtgtttcagaggaagaagcagacccttttgcaggcattcctgagataaacttaccaccagttggcaaaagtatgaaaaaacgtagctcctcaccatttttgcgttccaaaagccaagttaatacgccatttgtttcaaatgacaatgatggcgtttatcaaagtacggctgctcaagcaagactccgtaaataccattcaatgaggacacttaacggtacaacagaaactccagaaataagctctactttccatttgagttcaagagcattggaaaaattttaccacgaggagaacaggtggtgtaaaaagttagcctcatggtttataccccgagatgagaccattatcagtgttgatgaggaaacaatcatggatgaaagtacggtcaatagcaagagaaaatcctatatgtatgaaatcaggaacatggtaatcaattcgacaaaagattag

SEQ ID NO: 191012 - DNA, 1494 bp, Saccharomyces pastorianus
atgtttaaccatgattggaagtactccattaattctaagactttcgccgatttaaacattgaattatttcgaaaccacaagttcaaaactgttttaaattacataataggtgtagttgggtggaatggattaaaactcgccctttttgtttctgacatttacacatgtatcaaattgctggcattcaactcctggtcaaacaacatcatcaaaccatacttaccctttaaaatatccaaatggttgtttagcggttgtattttagcatcgattgtgctattgatatgggaggctatagcgggaatgaggatttacaaaacgggaaatatctctttgacttatgtcaacaatttttccagaaacctaaattcagtgctcaattattccaagttttgtgtttataatatgatcgaacgaaagggttttcgacagaaaatgacattttttactttttttcaactgaaagattgtattagattaatcttcacggataccccaaggcaagttattaatggtcttacgctgtggtcagttctcgtaacagtaaataaaaacgaggatctaggcgatctggaatcatttaccggtttgatcaacaaaataaagaacattggccagaccaatcatgaagaagcagtgatattgtcgctgatgctattttcctttataatctgggcattatttgtcttcaagtttctgcttgctgtcatttgctcgatttttgtttattataaaataatcaatgatcaggaatatagcgggttgcgtgagtacatttgtgttaccgtcagcgaaaatgttgatgaacttgttgaaagacaaaggaaaaaggaaaatgatgacacgatttataagacaggtcttctcgaatctcagacttttgacgattttaaagaagttgaaaataaaattgaaacatcttttaatgatacgtcatatgcttctaataatgattctatgattgagctaatagagagaagacccgaatacaaaagtcaggatgtatgtgggcccattcccacaatgaagaaaacggaaacaatggaatcgttcgttgacaatggcaatccacaatataccactagattctctgcgattctagattcaccatatatcaacagctatgaaagtaatgatataaagaaagcaaaaatacaaagcagaagcgtaaatactccaaaatatgaggatttgtcttcttctgacattttcaacaaaatacactctgctggacaattaaaatctacaacttctatggagtttcacgggccattagattctatgccaaatacaacaaacaacatccgtaattttaatagcaacagtagtagacctagaccacctcctttacagacaaaaagttcgattaattcaaaagctgactcgaatgataatggaaggatttatacaccaatgaaagcgtacttcagggagcctgatcttccgaggaagggtttgctggaagatgaagatcgtacatataattatacttaa

SEQ ID NO: 191013 - DNA, 554 bp, Saccharomyces pastorianus
atgtatgcatataatagaggaattggatgactaaatgttcttatattggagttagtggagatgcgtggtagatttgaattaaatagaaagtgctggggttgataaaccacgaaatatcgcagttgaggagaatgataagccaggatagatggtagcgcatttttggggcaatctcactgtaggtccaccacaactcaatatgactacatcgaatcagttataaggcaagtttttagtttactaacaaatatttccatcttattttttttttttgcagggctaagagaacaaagaaggtcggtatcacaggtaaatacggtgtccgttatggttcatcattgagaagacaagttaagaagcttgaaattcaacaacatgccagatatgactgttccttctgtggtaagaagactgttaagagaggtgcagctggtatttggacttgttcctgttgtaagaagaccgttgccggtggtgcttatactgtttctactgcagctgccgctactgttagatctaccatcagaagattaagagaaatggttgaagcttaa

SEQ ID NO: 191014 - DNA, 1023 bp, Saccharomyces pastorianus
atgaccgcaccattggtagtattgggtaacccacttttagatttccaagccgacgtcacggctgaatacctggccaagtattctctaaaggaaaacgacgcaattttggtcgatgccaaatcaggcgatgctaagatggctatttttgacgagctcttacagatgccagaaacaaagcttgttgcaggtggtgctgctcaaaacactgctagaggggcagcatacgttttgggcgccggccaggtggtgtacttcggttccgtcggtaaggacaagttcagcgagagattgcttaacgaaaacgaaaaagctggtgtcaagtctatgtaccaagttcaaaatgatattggtaccggtaagtgtgccgcattaatcactggccataaccggtccttggtcactgacttgggtgctgccaatttctttactccagaccacttggacaagcattgggacttggtcgaagcagctaagctcttctacatcggtggtttccacttgaccgtgtctccagacgctatcgttaagttgggccaacatgctaaagagaacagcaaacctttcgtgttgaactttagtgctcctttcattcctcatgtcttcaaagacgcattggccagagttttgccttatgctaccgtcatcatcgctaacgaatcggaggccgaagccttttgcgacgccttccaattagactgtgccaacactgatttggaagctattgctcaaagaattgtcaaggactctccagttgaaaagactgtcatcttcacccacggtgtcgaaccaacagtggtcgtgtcctccaagggtaccagcacatatccagtcaaacctttggactcttctaagatcgtcgacaccaacggtgctggtgacgccttcgctggtggctttatggctgggttgactaaaggtgaagatttggaaacctctattgacatgggtcaatggctagctgctttgtctattcaagaagttggtccctcttacccttccgaaaaaatatcttactctaaatag

SEQ ID NO: 191015 - DNA, 987 bp, Saccharomyces pastorianus
atgcctgttgttcattgttcgtccaacctgcccatcaccctatatatctatgagcgtctagtatattttattaaggcaagctctatatcaagctgcatatctgacaacttacttcttgttaataaaaccttcaacgacggaggttgtccaccacatattaacttctgcaatgatgagataattaacccaacagcgcctcaaacagtggttgaattagttcttaatgcaaaaaaaggtgaattaggctcgggttatctggctgttgaccacggaaaaaaggttgttattttagcatttagaggatccacaacaagacaagattggtttagtgattttgaaatatatcctgttaactattctcccctttgcgttaaggaatatcgtaagcttatagaggaaggaaaaatcagagaatgtgaaggttgtaaaatgcatagaggatttctaaggttcacagaaactctcgggatggacgtctttaaaaaaatggagtcgattctggaaagctttccggaatataggatcgttgtcactgggcactccttgggggcagcattagcaagtttggctgggattgaattaaagataagaggctttgatccgttagtgctgacattcgcaacaccaaagatatttaacagtgaaatgaaacaatgggtagacgagttatttgaaacagatgctatagaaaaggagtcaattcttaaagatgaaattcaatttcgtaagggctattttagggttgtgcatacaggtgattatattcctatggttccaccattctatcatccggctggtttagagatgtttattaacaaagttggtctacctcagaatgcggaagatattgaataccgtggtaaaaataacaggttaactttaaaggatggatttcgagagggtatgagcggtttggttgaagactggttacatgtctatgaacatcgagcctacttcattgacgtagtgggatgttctggactttaa

SEQ ID NO: 191016 - DNA, 2067 bp, Saccharomyces pastorianus
atggagtacatcaagattgccaaagtatctaatgtagtgctgcatagaagaggtacggccacacaaggtactttacatttgactactcaccatttgatctttgagtcaccacaattgtcgacggaattttggtttccatatcctttgatctatggagtgcataaaaacccgggtagtacattactgtccaagttgacttccactaatcaaatccaattggagggaacggattcacagaattacaagctttaccagggtaaggatctatggtcttttgtaaatatcaaggtaattgggaaagattatgcggtattctcattggatttcggtggtgatttacatctacaggcaagaaaggtgtatgattccatcttaaatttgacggtcctgtccaatatcacgcaactatatgcatttatttacatatccaacaatctggaaaggaaactaccttcacccgatagctgggatatatatgacccaattaaggaatttcgaaggcagggcctcgacagtaaagatgaaacatgtccttggaggctatccacggtaaacgaacactatgaattttgtccaacgtatccctcaaaactttttgtaccaagatccacgtcagatatattattgaagcatgcttcgaagtttagatcacagaaaagaattcctgttttaacttatcatcacaaggcaacagattgcaacattcttaggtcatctcaaccattaccggggttgatcaatcagaggtccattcaagatgaaaaattagtttgggaaagcttcaactcattttgtaataaagatattagaagaacgaaacatgtaatagtagatgccagacccagaacaaatgcattagcacagatggcgttgggtggcgggacagaaaatatggataattataatttttttttagctgataacaatatgggtgtcgataaaagtctaaaactgcccacagttacacggttatttcttggtatagataacattcatattgtttccaacacagctgcatacatgacggaagttatctgccaaggtggcgatttgaatttaccactggaacagaatttaattaggagtcaaaaattttccaattggttgaagttgaacactcttattttaaaatccgttgatatgcttttaaagtccatcattttcaatcattccaacgttttggttcattgttctgacggttgggacagaaccagtcaagttgtatcactattagaaatttgtttggatcctttctatagaacttttgaaggttttatgatcctagtggaaaaagattggtgctcttttggtcaccggtttttggaaagaagtggtcatttaaactctgatattagatttcatgataacactatgcattccaacttcaacgatgtggataccaatggcgatgatcttgacataggtgttaacactcaagacgattatgctgaagatgatgaaggaggtgaagatgagacgaatttaattaatttgagtagaatttccaaaaaatttaacgaaaactttaaattgaacaagaaaagtctaaagttcgtctccccagttttccaacaatttttagactgtgtataccaacttttgacgcaaaacccagatctatttgaattcaacgaaagatttttaagaagactagtttaccacttgtattcatgccaatatggaacattcctttccaatagcgagaaggagaaatttcaacagaatttgccaaacaagactaaaagtgtctgggactacttcagatctagaagaaagcagttcataaatccaaatttcatacagagaaaaagaagcggcatgaatgagcacgatcaaaaccttgaagaggaagaaaaagtggagtggatttcgccggatctgaagaaagtccaatggtggtggcagttatatggaagaaaagattcagaaatgaatgatgaattacgccataaacgagactcagtacccatatcggtggataaaaagagtaaagagcatagtaattccgatggcggtaagggtttaaatttgtcaatttttggatttgatatgtttaatagaaagtga

SEQ ID NO: 191017 - DNA, 852 bp, Saccharomyces pastorianus
atgaaccagatactaaatgcacaaaggctgatacaattatcacaatttcaccctaaactgaagaatatatggtaccttgttgcggccgccacgttcagtgtttgtaatgagccacaggaaatacctaaattataccactatgccatgctactgagtaatgataatgcacacatgtatagattcacattagcttcccaaaccattgacttactgcgctcagaattaccaatgagaaaaactttgatcaatgagaattaccaacaacctacttttttccaaaagcaattgacagcaaaatttagagaagttattcttaaaacaggacctctggccggccttccaagagcgatcaatggcctgactatgctaaaggaaactactccggacattttagtaccgcacttagacccaatagacccgtgggaggctgccatgggaaacagttctcccctttcggaaacctctatgagaaggaagcatgacaagacaatccaggaaagagatcataccatacagaacggcttacggcattggaattcaatatacaacaaagtctcaacccgcgtggtaaacaatctaaactcttcgtacccagacttatggtattatacactggtccatgtatatggccctttgtttgcctttgatgagatactatctgcgcaagagacaagtttagtgataattgcttctttggttccacaagatgttaatcctcaattgcgtgggcatttgaaaggtgccttgaatattggttgtgataaggaaactgtggaggcagtgagaggattggctatactaatatctcagtggtgtggtgttagttggaaatctggtgttgtaaaattgtaa

SEQ ID NO: 191018 - DNA, 150 bp, Saccharomyces pastorianus
atgcccaagcaaacgctgtcaaatgcaattccgctatgtccctttttcaactggaaagcaagttttaacccggatgatatttcttcagggtactttccttggtcgaaaacttggttcagttgctcactaatcttcaggaattcttggtag

SEQ ID NO: 191019 - DNA, 3486 bp, Saccharomyces pastorianus
atggttaatataagcatcgtagcaggaattgtagccttagctactagtgcggctgctattacagcgaccactactttatctccttacgatgaaagagtcaaccttattgaattggctgtttatgtttctgacatcagagcccacatatttcagtactactctttccggaatcaccataagactgaaacatatccttcggaaatcgcagcagccgtttttgactacggtgatttcactactcgattgaccggtatttcgggtgatgaagtaactagaatgatcactggtgttccgtggtactctaccagattaaagccggctatctcttcagcgctttcaaaggatggtatttacacggctatcccaacctctacttctacaacgactacaaaatctagtacttcgactactcctaccaccactatcacttctactacttctaccacatcgactactcctacaacctctactacttctaccactcctacaacttctaccacatcgactactcctacaacctctactacttctaccactcctacaacttctaccacatcgactactcctacaacctctactacttctaccactcctacaacttctaccacatcgactactcctacaacctctactacttctaccactcctacaacttctacaacttctaccactcctacaacttctaccactcctacaacttctacaacctccaccacttctcaaacttccaccaaatcgactactcctactacttcaagcacatcgactactcctacaacttctaccactcctacaacttctacaacctctaccgctcctacaacttctacaacttctacaacctctaccacttctaccatttctaccgctcccacgacctctacaacttcaagcactttcagtacttctagtgcctctgcatcctctgtcatttctaccactgctacaacctctaccacttttgccagtcttactacacctgccacatctacggcttctactgaccatacaacctctagtgtctcaacaactaacgcattcactacttctgcaactactactactacgagcgatacatatatcagttcaagtagtcccagccaagtcacttcatccgctgagcctactactgtcagtgaagtcacctcttctgttgaacctaccaggtctagtcaagtcacttcatccgctgaacctactactgtcagtgaattcacctcttctgttgaacctaccaggtctagtcaagtcacttcatccgctgaacctactactgtcagtgaattcacctcttctgttgaacctaccaggtctagtcaagtcacttcatccgctgaacctactactgtcagtgaattcacctcttctgttgaacctaccaggtctagtcaagtcacttcatccgctgaacctactactgtcagtgaattcacctcttctgttgaacctaccaggtctagtcaagtcacttcatccgctgaacctactactgtcagtgaattcacctcttctgttgaacctatcaggtctagtcaagtcacttcatccgctgaacctactactgtaagtgaagtcacctcttctgttgaacctatcaggtctagtcaagtgaccacgacagaacctgtttcttccttcgggtctactttcagtgaaatcacctcttctgctgaacctctctctttcagtaaagcaaccacttccgcagaatctatctcctctaatcaaatcaccatttccagtgaactaatagtttctagtgtaattacttcctcttctgagattccttcttccattgaagtacttacttcaagcgggatcagttcatcagttgaacccacttctttggttggaccttcttctgatgaatccatttcttctactgaaagtctatctgcgacatccactttcacttcagccgttgtttcctcgagcaaggctgctgatttctttaccagatccactgtttctgctaaatctgatgtctctggtaactcctctacccaatctactaccttttttgctacgccttccactccacttgctgtttcttcaactgtggtcactagctctaccgattcagtttctcctaatattcccttcagtgaaatcagttcctctccagagtcgtctactgcaattacgtctacatccactagcttcattgctgagcggacttcttccttatatctttcgtcatcaaatatgtcaagtttcactttaagtactttcactgtttcccaatcgatcgtctcttcattttctatggaacctacatcgtcagtcgcatcttttgcatcaagttcccctctcttagtatcctcaagaagtaattgcagtgatgccagaagttccaacaccatcagtagcggtctgttcagcacgatagaaaatgttcgtaatgcaacctcaacatttacaaacctatcaacagatgaaattgtcatcacgagctgtaagagtagttgtactaatgaagatagtgttttgacgaaaactcaagtttctaccgttgaaactactataactagttgttcgggtggtatttgtaccacgctgatgtctccggttactactattaatgctaaggcgaacacattaacaactacagaaacttccacggtcgaaacaactataacaacatgccctggtggtgtttgctcgaccctgactgttccagttactacaatcaccagcgaagccactaccaccgctaccattagttgcgaagataatgaagaagatatcacttctactgaaaccgagttgctaactttggaaactactataactagttgttcgggtggtatttgtaccacgctgatgtctccggttactactattaatgctaaggcgaacacattaacaactacagaaacttccacggtcgaaacaactataacaacatgctctggtggtgtttgctcgaccctgactgttccagttactacaatcaccagcgaagcaactaccaccgctaccattagttgcgaagataatgaagaagatgtcgcctctactaaaaccgagttgctaactatggaaactactattactagttgttcgggtggtatttgcaccacgctgatgtctccggttagtagtttcaactccaaagccactacatcgaacaatgcagagtcgaccatccccaaagcgattaaagtcagttgctctgcgggtgcctgtaccaccctgactactgtcgatgcagggattagcatgtttaccagaaccggattgtctatcactcaaactactgtgaccaactgctcaggtggaacctgtaccatgttaactgcaccaatcgcgaccgctaccagcaaagtcatctcaccaattccaaaagcctcctcggctacttccattgctcattcatctgcttcttatactgtcagtatcaataccaacggtgcctataatttcgataaagataacatttttggtaccgctatcgttgctgttgtcgctttattactgctatag

SEQ ID NO: 191020 - DNA, 1632 bp, Saccharomyces pastorianus
atgtcagcggatgctagtacaaattcgaatgcttccctagacgaaaaaaatttaaacatcacttcagaagctgaaatcaagaatgaagacgtaaccgcggagccagttctaagcacggtactatcacccaacggtaaaattgtctacatcagtgacaaggttgatgaggccatgaagttggctgaagaagccaaagaaatcgaagtgacaccagaagaagatagaaaacttcgttggaagatcgactattgtatgtttcctttgatgtgtatattgtatgctgttcaatttatggacaagatttccactagttcagcggcggtcatgggattaagaactgacttgaaaatgcatggtgaccagtattcatgggttacttccgccttttatttcggctatctatttatgaacctaggcccggtacagttcattttccaaaggaccagtcacatgtcaaaaatgcttgcggtttttattgtcatatggggaatgttattagctttacatgcagctccaacagttaagtatccttctttcattgttttgagagtacttttaggttgcgcagaaagtgttgtcacaccttgctttaccattatcactgctcaatactggaagacagaggaacaattcacaagagtatcaatttggtttggtatgaacggtcttggctccatcctgatcaacgcaattgcgtacggtgtttacattcaccaggattcttatgctattaaaggctggagaaccttatttgtcattactggtgtgataacaatcttcattggtatcttgatattcctgtggatccctgacgatccatcaaaagcaaggtttttatctaaaagagagaaattaatggttgtccaaagaattaggtctaaccaacaagggttcggtaatcacgagatcaaaaaataccaaattatagaggcgttgaaggatgttaggacgtggttatatttcctctttactgtgagctctaatattcctaatggtggtatttcaagttttatgagtattctattgaatagtgattttggatattcatcaaaggaaaccctattaatgggtttacctacaggtgctgttgaattggtaggttgtccactttttggtattctagcagtttatgcagccaataagaagataccattttggaaatataagttgagttgggctatttttgcagctgtcttagcattgattgctagctgcatgttagggtttgcaacaaactccaaaaaagcaagactggctggtgcttacctgtggtacatctcgcccgtctcatttatttgcgtactttccaatatcagtgcgaattcctcgggatatagtaaaaaatggactgtatcttcaataaacttagtagcatatgctgcagctaacttggcaggaccacaaacctttattgctaagcaggctcctaaatatcatggcgctaaggtcgctatggtcgtatgttatgctgttatgatcgtgcttctatctatactgctcatcgtcaatttaagggaaaacaagagacgtgataagatagctgccgagagagggttccctgaagaaacagagaatttagagttttctgatttgactgattttgaaaatccaaatttcagatacactttatga

SEQ ID NO: 191021 - DNA, 1086 bp, Saccharomyces pastorianus
atgatttctgctaattcattacttatttccactttgtgcgcttttgcgatcgcaacacctttgtcaaaaagagattcctgtaccctaacaggatcttctttgtcttcactctcaaccgtgaaaaaatgtagcagcatcgttattaaagacttaactgtcccagctggacagactttagatttaactgggttaagcagtggtactactgttacgtttgaaggcacaaccacatttcagtacaaggaatggagcggccctttaatttcaatctcagggtctaaaatcagcgttgttggtgcttcgggacataccattgatggtcaaggagcaaaatggtgggatggcttaggtgatagcggtaaagtcaaaccgaagtttgtaaagttggcgttgacgggaacatctaaggtcaccggattgaatattaaaaatgctccacaccaagtcttcagcatcaataaatgttcagatttaaccatcagcgacataacaattgatatcagagacggtgattcggctggtggtcataatacggatgggtttgatgttggtagttctagtaacgtcttaattcaaggatgtactgtttataatcaggatgactgtattgctgtgaattccggttcaactattaaatttatgaacaactactgctacaatggccatggtatttctgtaggttctgttggtggccgttctgataatacagtcaatggtttctgggctgaaaataaccatgttatcaactctgacaacgggttgagaataaaaaccgtagaaggtgcgacaggcacagtcactaatgtcaactttatcagtaataaaattagcggcataaaaagttatggtattgttatcgaaggcgattatttgaatagtaagactactggaactgctacaggtggcgttcccatttcgaatttagtaatgaaggatatcaccgggagcgtgaactccacagcgaagagggttaaaattttggtgaaaaacgctactaactggcaatggtctggggtgtcaattaccggtggttcttcctattctggatgttctggaatcccatctggatctggtgcaagctgttaa

SEQ ID NO: 191022 - DNA, 1041 bp, Saccharomyces pastorianus
atgaacacagattcacacaaccttagtgagccatacaatataggtggccaaaaatacattaatatgaaaaaaaaggaagatcttggcgtatgccagcctggcttaacgcaaaaggcattcacagtcgaagacaagttcgattacaaagcaattattgaaaaaatggaagtatacggactttgcgtggtcaagaattttatagagacctccagatgtgatgaaatattgaaagaaatcgaaccgcatttttatagatacgaatcatggcaaggctcaccgtttcctaaggaaactactgtggcaacgagatcggttttacactcatctacagtcttaaaggatgtggtatgcgaccgtatgttttgtgatatctcaaaacattttttgaatgaagaaaactactttgcggcgggaaaggtgattaataaatgcactagtgatattcaactgaactccggtatagtctacaaggttggcgctggtgcaagtgaccagggctaccaccgagaagatattgttcatcatacgacccatcaagcatgtgaacgtttccagtatggaaccgaaaccatggtagggttaggtgtagcttttacagatatgaataaagaaaatggctctacgcgaatgatagtcggttcacatttgtggggtccgcacgattcctgtgggaactttgacaagaggatggaatttcacgttaatgttgcaaagggagacgcagttctattcttagggagcctctaccatgcagccagtgcaaatcgtacgtcacaagacagagttgctggatatttttttatgacaaagagctacttgaaaccagaggaaaatcttcacttagggactgatttgcgagtgtttaagggtttaccattggaagccttgcaactgttggggctcggaattagtgagccattttgtggtcacatagattataagagtccaggacatcttatcagttctagtttgtttgaaaatgatatcgaaaaggggtactatggagagacaataagggtgaattatgggtccacgcaataa

SEQ ID NO: 191023 - DNA, 867 bp, Saccharomyces pastorianus
atggcatcaagaaaactgcgtgaccagattgtaattgccactaaatttaccacggattataaggggtatgatgtaggcaaggggaagagtgccaatttctgtgggaatcacaagcgcagtttgcatgtaagtgtgagagattcccttcgtaagttgcaaactgattggattgatattctttacgttcactggtgggattatatgagctccattgaggaagttatggatagtttgcacattcttgtgcagcagggcaaagtactctatctaggtgtgtctgatactcctgcctgggttgtttctgcagcaaattactacgccacatctcatggtaaaactccctttagtatctatcaaggtaaatggaatgtattgaacagggactttgaacgtgatatcattccaatggctaggcattttggtatggctcttgctccatgggatgttatgggaggcgggagatttcagagtaaaaaggcagtggaagagcggaagaagaaaggagaaggcttgcgtaccttttttggtacttcggaacagacggatatggaggttaaaatcagcgaagcattgttaaaagttgcggaagaacatggcactgagtctgtcactgctattgccatagcttatgttcggtctaaagcgaaacatgttttcccattagtgggaggaagaaagatcgaacatctcaaacagaacattgaggctttgagcattaaattaacaccagaacaaataaagtacttagaaagtattgttccttttgatgtcggatttcccactaattttattggagatgacccagctgttaccaagaaaccttcatttctcaccgaaatgtctgccaagattagcttcgaagattag

SEQ ID NO: 191024 - DNA, 351 bp, Saccharomyces pastorianus
atgctacagtatataccactctcaaacttaccctactctcacattccactccatcacccatctctcaccatcagtaccaaatgcactcgcatcattatgcacggcacttgcctcagcggtctataccctgtgccatttacccataactcccacgattatccacattttaatatctatatctcattcggcggccccaaatattgtataactgctcttaatacatacgttataccacttttacaccgtatactaaccactcaatttatatacacttatgccaatattacaaaaaaatcaccactaaaatcacctaaacataaaaatattctattcttcaaccataatacataa

SEQ ID NO: 191025 - DNA, 990 bp, Saccharomyces pastorianus
atgaccaccgtgtccatcaataagcccaacctgctgaaattcaagcatgttaaaagctttcaacctcaagaaaaagactgcggacccgtaacctcattgaatttcgacgataatggccagtttctactgacctcttcttccaacgatacaatgcaattgtacagtgccacgaactgcaaattcttggacactatagcctctaagaaatatggctgtcactccgctatctttacgcacgcacaaaacgaatgtatctattcctctacaatgaaaaattttgacattaaataccttaatctggaaacaaaccaatatctaagatatttttccggtcatggcgccctagtgaatgatttgaagatgaaccccgtgaacgatacgtttctatcgtcgtcatacgatgaatccgttaggctttgggatttgaagatctctaaaccgcaagttattataccaagtctcgtaccaaattgtatcgcatatgatccaagtggccttgtattcgcattggggaacccagagaatttcgaaatagggctatataatctgaaaaaaattcaggagggtcctttcttgataattaaaattaatgatgcgactttcagtcaatggaataaattagaattttctaacaatggaaagtatttattagttggctcctcgataggaaagcatttaatttttgacgcattcacaggtcaacaattattcgaactaataggaacaagggccttcccgatgagagaatttctagattctggatctgcttgtttcacaccagatggtgaattcgtccttggaaccgattatgacggtaggattgccatttggaatcattctgattcaataagtaacaaagtattaaggccgcaagggttcattccctgtgtttctcatgagacctgccccaggtcaattgcattcaaccctaaatattcgatgtttgttaccgcagacgaaacagtagatttttacgtgtacgatgaatga

SEQ ID NO: 191026 - DNA, 3249 bp, Saccharomyces pastorianus
atgatgagtggcacaggaaacgtttcctcgatgctccacagctatagcgccaacatacagcacaacgatggctctccggacttggatttactagaatcagaattactggatattgctctgctcaactctgggtcctctctgcaagaccctggtttattgagtctgaaccaagagaaaatgataacagcaggtactactacaccaggtaaggaagatgaaggggagctcagggatgacatcgcatctttgcaaggattgcttgatcgacacgttcaatttggcagaaagctacctctgaggacgccatacgcgaatccactggattttatcaacattaacccgcagtcccttccattgtctctagaaattattgggttgccgaaggtttctagggtggaaactcagatgaagctgagttttcggattagaaacgcacatgcaagaaaaaacttctttattcatctgccctctgattgtatagcgaaggacaagtttttcaccagctcggacgatcccaccaacttgacaatacccaatagggacatcaacgaaaggactcttttcttggacgcctttcttttgtgtgcatctaacaacaatagcaacaacttcaagcagacctatgtttgtaatagatgtatcaacagggaaaaaagaagagcgtcgagaagaaagtctgggttgaacgacaactccatctggcaaaataacgaaaacaaaagagcaatcatattcaatagtaaacaacttttcatcattagtaataacggtttgagtggtaactctaactgtatcaatttcgacttaccgacgagaatcgtctgttactgcagacaccacaaggcaactaacgggtttgtagttttgttccttctaagggaccataacggcgatatcttggcgaaaactataacagatcccataatgatcatggacaagaaaaatgccagcaataccacaactccaaccagcaccagcaatgcccaggtttcgccaatgacaaatgacactagatccttttcatcgccgcaaagtgacttaaacttcccatccgaattccccctgccttctaacagtaaaaattttgtcatttctacgaactgtatgcttgatagcaattgtaataacaacaacaatgataatgataacaaaaacaacattaagactaataccgcaatgatgaacaacaacagacactttccatcaccaaattcctccagtgaggacagcaaccattctttttcagatattcatttttctaataacaacgacaacaatttacatcgttcactagactcttggtcgtccacaggttttaatagttcatctaatcccgctcttactacattaactagtgatttcagtgcggcctctgcgagacacactggcaagaggcagcgttcggtaaacgagccttttatgtctacgcctaatacgttttcccgtcttccccagaaattcatcgattcttccaaagatatatcgaaccataatagtgtccccgtggcgctaaataacaagccttctattcagcgtgtcatccccgcacaaggttccatcaacggaggtatagaagtgactctacttggctcaaagtttaagcagggcttaatcatcaagtttggcgaaaatatagcattgtccagccaatgctggaatgaatctacgatggtgacttatttaccgccttcatctaaacctggaccggttttggtaaccatagtcgacccaagtgaaacgtctatgagaaataatagcaatagtagtgtttccaccagcaatagtaccaatgacattctgcacttaaacaagtataccggtgagaaagcaatctttacttatgttgatgatactgataggcaactaattgaattggctctgcaaattgtggggctgaaaatgaacggtaaactggaagatgcaagaaatattgctaaaaggattgttggcagtgattcatctccatctaataataacgcaggattacactcacagaatagctctttaaattcgtacacgaatatgatgcgaaatataaacgatgaacaattgatcactgaagttattaagtcatttaagagaaataataatctctctaccgtcaatctttccatgtgtgacgttaggggtagaactctattacatctggcagcattcaataactggtatagtcttgtctcattactaatcaaatatgggtcgcatttgaacgaccaagatttatttggttttactccgctacatatggcgtgtattaatggtgacttgagaattataagactattgttagaatgcaacgttaatattatgaagaaaaccagaaacggctttatcgctaaacagttcttcctgatgaattatactgtcaacaagaccagatattctaattatgaaaccagtctgtttgacgacattctgactagattaacgaagaatacaacaggatccagtgatactcaaccgtttgagagaaatgtatcccagtcaagtttcaactcaagtttatttgatgatgacgatgctgatcatgactatgtccaagaaagaaaatatttattggcggattccgctgcccttgcccccgaacaatccaactgtaatgacaatacgtcattctcaatcctagattcggattcaggttatgacataagtgattgtgaatcatcttcagatgagattgctttggagttctttaacacccacaaaatcaaggacttctcttcaaagccaaatgaaataccaaaaactactaagactagcatagagcctgacggatctttatggaacagaatgctaactcgtttaaatgacgagctcccaaagtatgaagacttgttcccaaaaaaacccaaaaactgggaacttggtagcaaatctgtggagattgggccagataattctgcccaaatgaccgtggatgattctcaaacttcttctgaagacgatgaattagaagctttacaggtcgggttcaacacaatcttttccaagaagcaaaactttcagaatgataagatgctcctattcttttggatccccttaactttagtactcttattatgtttcacattatcgaatttggggaaagatgatgatatgtttcataatttatccaaaattgttcaggaatatttaagaattggtttagccaaggtactactaggcaacgaaaggatgaaaacctcttttaaaatgcagttatcgaagtttcaaaacaataacattctaaacgacatgcgagtcaattaa

SEQ ID NO: 191027 - DNA, 321 bp, Saccharomyces pastorianus
atgggttacgtaattatgacgttttcgagtgcgaggatgtcagaaaggagagccagaattatatatatatggatgcatctctctgcatataaaattaatttccctttcgtacagttccctacttttttttccctctttcgtttgcaaaagaaggcggccatactcattaaaaacccctccccatttttccttttttttttgtttccatataggaagaactctacagctcgaacaatacatcaaatcaatcaagcagtcgctctcgttctattgtgtgtttctcaccaccttacatatctcccctcagttcccagcctataa

SEQ ID NO: 191028 - DNA, 720 bp, Saccharomyces pastorianus
atgaaattctccactgctttgtctgtcgctttattcgccttggctaagatggtcattgccgattccgaagaattcggcctggtgagtatccgttccggctcggatttacaatacttgagtgtttacagtgataacggcactttgaaacttggcagcggtagtggctcatttgaggcaactattaccgatgacggtaaactgaaatttgacgacgataagtatgctgttgtcaatgaggatggctcattcaaagaaggttctgagagcgatgctgccactggtttttctattaaagatggccatctaaactacaagagctcttctggtttctacgctatcaaggacgggtcgtcttacattttctcttctaagcaatccgacgacgctaccggtgttgcgattagaccaactagtaagagcggatctgttgcagcagatttttctccaagcgactctagttcctcttcatctgcttctgcttcgtctgcttccgcatcatcttctacaaagcatagttcgagtatagaatctgtcgagacctctactactgtggaaacttcctctgctagctccccaactgcttcagttatctctcaaattactgatggacaaatccaagctccaaacacagtttacgaacaaacagaaaatgcaggtgccaaggctgccgtcggcatgggtgctggtgctctagcggtcgcagctgcttacttgttgtaa

SEQ ID NO: 191029 - DNA, 372 bp, Saccharomyces pastorianus
atggtcaaattaacttcaatcgctgctggtgtcgccgccatcgctgctggtgttgccgctgccccagccactaccactctatctccatctgacgaaagagttaacttggtcgaattgggtgtttacgtctccgatatcagagctcatttggcccaatactacttgtttcaagcagctcatccaagtgagacctacccagttgaaattgctgaagctgttttcaactatggtgacttcaccaccatgttgactggtattccagctgaacaagtcaccagagttatcactggtgtcccatggtactctaccagattgagaccagctatctccagtgctctatccaaggacggtatctacactatcgcaaattag

SEQ ID NO: 191030 - DNA, 348 bp, Saccharomyces pastorianus
atgctacgtatataccactctcaacttaccctactctcacattccactccatggcccagtctcactaaatcagtacgatgcactcacatcattattcacggcacttgcctcagcggtttataccctgtgcaatttacccataaaacccacgattatccacattttaatatctatatctcattcagcggctccaaatattgtataactgctcttaatgcatacattataccacttttactccatatactaaccattcaatttatacacacttatttcaatatacccacaaaatcaccactaaaattacctaaacataaaaatattctactcttcaacaataatacataa

SEQ ID NO: 191031 - DNA, 378 bp, Saccharomyces pastorianus
atgaacgtcgttagagtctggccattttctacacgaactataccttgtaccactacagtggcagcttggtggacatgttgcgtgacagtcacagcaactggggcagataaagcgacagatgcagatgcggccagtagtgagactttagaaaatttcatctttgtaagttttattaaaggaatggtattgttttatgatgggctgtttcgaggaacgatgataccaagagccaacagatccatcacagcaatatgtaacactctgcgacaagcatatatatatacaaagatccaaagcattgcctttgaacgacgtctatgtttccaaaacattacatatagagaagtgcgtgagatacacgaaatgtactgtaaatag

SEQ ID NO: 191032 - DNA, 990 bp, Saccharomyces pastorianus
atgaaattttctaaagtctcactactggccgcatctgcatctgtcgctttatctgccccagttgctgtgactgtcacgcaacatgtccaccaagctgccactgtagtggtacaaggtatagttcgtgtagaaaatggccagactctaacgacgttcattaccaagggcactcaaacggcttctgctagtcccgttgccacaacatcagctcctattgtggttgctaatgctcaagtggacagcatagctacttccgttatccaagaaagcgctgtcgtggctgaatctgcaacatttgaagaatcctctacagaaacatctgaagcattttctacagcaactgcaaccatacaagcggtgcaaacctccgcaagtgccacacaggatgatgtaaccacaactttaacatcttcaacacaacctaccagcacaactactccaacaaccactaccactagcccaaccactaccactagcccaactactaccgctagtccaactactactgctagcccaaccaccgctaccaccactcaatctaccgcctcaagcactcaatcctcaagctccgatttctcaacgtcaatggttaacgaacacaacactaaaagggcgttgcacaaggataccggttctttgacatggtctgacacactagcaacatatgcacaaaactacgctgactcctacgattgttcaggcaacctagtccactccggcggtccatacggtgaaaacttggcacttggttacggtacgaccggctctgttgatgcctggtataacgaaattaccagctacgactattccaaccctggttttagtgaaagcgcaggtcacttcacccaagtcgtatggaagggaacttctgaagttggttgcggtttgaaatcttgcggtggcgaatggggcgattacatcatttgttcctacaaagccgctggtaatgtcattggtgagtttgctgacaacgttatgccattagcttaa

SEQ ID NO: 191033 - DNA, 1656 bp, Saccharomyces pastorianus
atgagtagtggtaccgaaaatgatcaattttatagttttgatgaaagtgattccagctctattgaactttatgaatctcacaatacatctgaatttactatacatggactagttttcccgaagttaattagtgtaacaagccaagattcagaatttgacatcaatgaagatgaagatggagtcgataccatatatgaggggatgctagatgctcctcttacgaaaaacaacaaaagaatactgtgtgaagggagtgtaccgaatctcagttatgaatgcttaaccaccaagggtatatttgaaagaatgcttcaaagggttgaccatttacaacctatttttgcaattccatctgcggatatattgatattactacagcattatgattggaacgaggaacgtttgctagaagtttggaccgaaaaaatggacgaattgcttgtggagcttggcttaagtaccacagcaaatatcaagaaagataatgattataattcacatttcagagaagttgaattcaaaaatgactttacatgtattatttgttgtgataaaaaggatacggaaacatttgcgttggaatgtggccatgaatattgtatcaattgctaccgtcattacatcaaggataagttgcatgaggggaacatcattacatgcatggactgttccctggcattgaaaaatgaagatatagataaagtgatgggacatccttcgagtagtaagttgatggattcttcaatcaaaagttttgttcaaaaacataatcgtaactataaatggtgcccgtttgctgactgtaaatccatcgtgcacttgcgagatacgtcatcattaccagaatatacccgtttgcattattcacctttcgttaagtgtaattcatttcatagattctgtttcaattgcggattcgaagttcattccccagcagattgtaaaataaccactgcttgggttaaaaaagccagaaaagaatcagaaattttgaattgggtcttgtcccacactaaagaatgtccaaaatgttctgttaatattgaaaaaaatggtggctgcaaccacatggtttgctcaagttgtaaatacgaattctgttggatttgtgagggcccctgggcgccccacggtaagaacttttttcaatgtacaatgtataagaataatgaggataataaaagtaagaaccctcaagacgctaataaaaccttgaagaaatacactttctactatagattgtttaacgaacatgaagtttcagccaagcttgattggaacctggggcaaactttgggcacgaaagttcatgcactacaagaaagaataggtatctcatggattgatggacagttcctatcagaaagtttaaaagtgttgaatgagggacgaaccgtattaaaatggtcatttgccgtggcatattactcggatgcatctcataatttgacgaagattttcgttgataaccaaatgctcttagccaacgcagtggaatcgctatcggagctattgcaaataaaaacccccgaagtgatcatgaaacgaagaccagagttttataataaggccggatatgtggaaaatagaaccactgcattaatggaatgcggtagagaactgctatgtaagggaatttgcaaagctgcagaatga

SEQ ID NO: 191034 - DNA, 2178 bp, Saccharomyces pastorianus
atgtttaaagtgtttggttttggtgcgaaggaagagattcctgagctttcacaggaagaaaaaactaaagccattctaaaacaagctcatgatttcgaacaggcactgcgtgcgatggactatgtcttagatgataatgctgacgagggtttggctttgctggatgagagtgatgctaaagaagcttccgaccaaactataaatgcgttagctcgtggtgtcattgaatttttggaggccactttaggttttgaagctgaagagatgaaaaaagcttctgcgactttggccaaggcagaagctttatctttgaaaagtagagagagggctcaaaaaattggattgaagagcagttctttatatcctccaggaacagtttatgccgtgacttatacagaatcatgccttctacatgccctattgatgattttcagtgaaagtatgatggaggcggccaaggccattttaaagctcagaaagtcgtactatatgttacaagaaatcttggaaactattaaagctgctaacaaagccaagaaattgaaaattacgtcaggcagtgaagataaggagtccaccccagcgactttcataactggtggcgatgcgttcaattccgttgatataccttatgaactgactcctgaagaacaaaaggataaggatcttttacaatttgctgaacaaattcatagcatgaggactgaaagattatctggcgcccacattggcaactctcctgcaattaacaggttgagaggtgagctaggactacaagcaatggaagacttgccagaagaggaaataacagatcataaagttctttcggatgatatagatttaagtcaagcaacaattgatgagtttgtccattctggtgtcaatttatgctttggtattttacaggttgtgatatcactattaccacccgctattggcgcggtcctatctgtggttggattcaggggttccagagaagaaggtttgagacttgtttggaaagccacaaagcaaagaaacgtgcatggttgtattggtttgttagccctgatgttttactatgatggacctttccaattcactgacgatgattttgatattcctgcagcagttaaggattccagtaacagtgaagattctgaagatgaagagatggatggccctacgttgttgcatcctgggaaaatactggaagatgcgttgctgcaatcaagagcgctatttcccaatagtgcgctatggttattgaatgaggcaaggatgctatctggtaaagggcgtttagaggaagcagtcgcattgatggattcgattgatgttagcaagatacggatgagacaggtcaaatccttgatgatttttgaccgtgctataacattgatccatttgcatcaatacgatagagctgcagaagatattttatcgctattagacatcagtgattggtcacacgctttttacacatattttgctggctgctgttatttagaaaattggagaatgtgcgaaatgggattaatgaagtcagacaaaaaggatgaataccaaaagaaggccgaagaacttatcttcacctctgtgaatttgctaggtaagaaaaccttcaaatcgaagaacctgccattagataggtttattctgagaaaagttgagcaatttaaagcgaaaaaggaggaacttggggtggaaaatcctctggatggtatcgctacttcaccagtacacgaaattgcgtacttctacaatggttataatagaatgtctgaagagcatttggagctaacaaagaaaatgctaactgagtatagaaatcccgccattgaagctttagactcagatcaggagttaatcaaagatctcttggtctctttgacattaagaagattaggtcatatccaagaaggttgtgatatattggatgaaaaggttctacctaagtttttctccattcaaaatggcaaggtcaaatatataaagaaaactgaagatccatgggcctatccgactgcactttatgaacgtgctctatttacatggaagttggagggcatggatggccttccagagagtaaagaatggttactgagggctcagggctacgcagatgattatgaattgagtacgagagtaggtatgaaaattaaggctgccattgaccgcgttgaccattcattgtaa

SEQ ID NO: 191035 - DNA, 1848 bp, Saccharomyces pastorianus
atgagactttcgtttggtaaacagcgttatcatggcggtacaacagtaactttgactgaacaaggagcttcagattcccttcgcgctgcgcaagctatcttccagaaccattccaatgaggtcagcagtccatgccctccagtaacggtgagcaggaatcctcaaactaggttatcagagccatcgctacaaaagtcagggcggaaacaagaacaaaagaaggcacgcatacgaacaaaacaggtacctaagattaaaacaacggcgcctaatgatgttgagttgtctaagaaacacaggtcaagccctgcaggtaaagataatgttagtagtactgctcaaatggcagctgctttagcgcattcacaatcgaaacttagttctgacaataactcctcccattcttcggcattggatacactaaaagttctagaaactccgaacttgaatggcttgctgggcattcattcacgctcaagctcaagaaacggctccaatgaatcactgacgcctggccaaagaactcccgacaatagatctcaagagaatttacttacttcctttagtagcggtagaaggctatcctcgagctctatggagcctgcaactaataaagacagcaacaaagctctgcccaaacgcaggccgtctcctcccttgcaatcatcacttgtcggcagtggtcagcttcatgaaaatgaaaacctatcatcaattagcatcgattccagacatagtctcaatccggacacttcagacgttatttctaataggtcacaaacaagtctatctcaaacaattaatcaactctcgttatgtgaatcagagccatctattgcaagctcaaacactactactacaacgagcaaccagggaagtggtttgcccaacttggttccgaactattcatccgatatgaggaagaagaagcttgttaacaagttcaaaaggaaagtatttggtagtaagcccaagcacttatcttcacaatatgaaatggatgcaagcagcgaagaactgggacaacatgaacaacaaccgagtatgagatttaaaacaacattacgtaaaacctctgtaagtacaaacgcagaaaatgatcatgcatcctctctacatgagggaaatctgaggtataagtacaatccgtccaacgacacgtatgatgtgtatgacgatactgattctgattctgaatctgatcagaaccaggacgccttgaccaagccacgcaaaagagatagaattaagagaaagatcaggaattctgccaataaaactgcacatcataggcctatccaccgcacgagagatcggaaattcaatgaggataaaccctggaaatcacatacagatataactttcgtaacagacaacgaaaggaagcgttacgaaagcatgtgggtaagcaacagacaccgtcatttgaacctgttgagctggtggccctctataacgggtgattccggagcaattaatactttacccgaagatggattgatattgggtatcatagtccgtgatatctggaagcggtctaacttgcccaatagtctattggcagaaatttacacgaaggtagacacaagaaaagatggtactttagataggaaatcttttattgtgggtatgtggctggtcgatcagtgcctgtatggcagaaaacttcccaatgttgtcgagcaatgcgtttgggatagcgtagatagatatgcttccaccacggttgtgccagtgagtacgctaaaggcgatggccaaacaaaagagaaaacagatgaaagaagaaatcaagaatatcaagaaggaaaaccgtgtagttcttgtagaccacaatagctcgtcgtga

SEQ ID NO: 191036 - DNA, 495 bp, Saccharomyces pastorianus
atggcagaacaaattagtcacaaaaagtccctgagggtgagcagtctgaacaaagatagaagattgctcttaagagaattctacaacttggaaaatgaaccgaataaaggtcgtcaagaagcacgtataggggaaaaagccagcgaggctcattctggggaggagcaagtcacagatgtgaatatagataccgaagcaaacactgagaaaccagtgaaagatgacgaattgagtgcaactgaagaggatctcaaggaggggtcagaagatgcagaagaagagataaagaacctgccctttaagaggctagtacaaattcacaataagctcttgggcaaagaaaccgagactaacaattctatcaagaataccatttacgaaaactattatgacctaataaaagtcaacgaccttctcaaagaaattacaaacgccaatgaagaccaaattaacaagttgaagcaaacagtagaatctttaatcaaggaactgtaa

SEQ ID NO: 191037 - DNA, 642 bp, Saccharomyces pastorianus
atgttttttcagcccctcaatgctcttagtctttgtgcaagtttgtcttccttttcgtcgtcaacattaacctctttcgcctttatctccggaacattgtccagttttgcactttgcttcaattccatgccattttcgtcagcaactttgctcattagttcatccaccttatcgttgtccaccagcatggcatccgaattcacacccatatcttcatatacgttaacactggtgtccaaatcttcgaattgctgttcgaacttgtccattatcatggttatctgttggaggttcatattctgtaacgccttatccatgcctttgcaaacttgccccattgatgctgacacctgcctcatcgtgacggcggtttgtacccttgatgcgaccgaatccacccgtgatgccaacttcaacagttgtaatctttcatttttctttcttatagcattggatgcatatatacgagatatatcttcattttcattaagagcacgtttgagcttattagtttcctgtttttcttcctttgaggctttattggcttgcttttgtaattgttttgatgtaaactttagttggaaaagagtgttttccaaacctgctgcagaattacgtgacatttctcagtgcgatgtctga

SEQ ID NO: 191038 - DNA, 1980 bp, Saccharomyces pastorianus
atgacatataagattaccacgagcgagagtaaaaaagagtatctctatatgggttcgggcgatactagaggagaaagctctctggtagctaaaccaatcgaaattatacttaataagctaccacatgccatactagcgcaacaacaatttcaaaaatatataacgagccccatctacagatatctttccaaacttctactgttcagagaggtggcttggcccgaaagtacaaaagatacccagaaaggacaagtagggatattttcctttcaaaacaattatgcagactctgcaacaactttcagaatacttgctcatttagatgagcacggatacccgctacccaacggtgccgctgaaaagaatttaccttctttatttgaaggattcaaagctaccgtttccatcattcaacagagactgttgttagacaatgtagacggggccacgaatagtgataaggaaaaatacgttcaattgccggatattaatactggttttgtgaataaaacgtactctagaattgacctaacacatttacttgaggatgtagaaactaacgtggaaaatctgtcaatcaataaaacgttagagatggatgagttgaccagattagattccatgatcaacgaactagaatccaggaaattaaaaatcctggaaagggttaagcacattgatagtaagtctaccaatcttgagaatgatgtaacactgataaaggatagaataaattttatcgaggaatacaatttggaagctgatcgtgaacagagcttacggaagcaaatggaagaagaaagatcatctgaagcgtcgtccttcacgcaaaatgaagaagccatatcgtcgttatgtgatgttgaaagtaaggatacgagattaaaagatttttacaagatgccccatgaaaaaagccacgataaaaacaggcaaattatctcagaaacatatagccgaaataccacggctttcagaatgacaataccccatggcgaacatggaaacagcataaccgcattagactttgatacaccatggggaaccttgtgctcatcaagctaccaagatcgtatagtaaaagtgtgggatttgaaccatgggatacaagttggagagctgcctggtcaccttgctactgttaattgcatgcaaatagataagaaaaattacaatatgttgattactggaagtaaggatgccactctgaagttatgggacttaaatctgagtagagaaatatatttggaccatagtccattgaaggagaagacagaagaaattgttacaccatgtatccataattttgagttacataaagacgaaatcacagccctgtcttttgattctgaagctttggttagcggatctagggacaaaaaaatattccactgggatttaacgacgggcaaatgtattcagcaacttgaccttatcttcacacctacacatagcgacattaaaatgcctgcacgttcattaaacaatggtgcatgtttacttggcacagaagcaccaatgataggagccctccaatgttacaactctgcattagcaacaggaacaaaagatggcattgtgcgactatgggatctaagagttggcaaaccggtgagattactagaaggccataccgatggaattacaagtttgaagtttgattccgaaaaattggtaacaggctcgatggacaatagcgtaaggatttgggatttgaggacaagctcaattcttgacgtgattgcttacgatttaccagtatcgtccttagatttcgatggtaaattaatcactgttggcgcaaacgagggaggggttaatgtctttaacatggagcgcgatgagcattggatgactcctgaaccaccgcattcactagatggggatgagctgagcagaagaattgctattgtcaagtataaagacggatttctgatcaatgggcacaacgatggagacatcaatgtatggacactttag

SEQ ID NO: 191039 - DNA, 504 bp, Saccharomyces pastorianus
atgacttcgtttcaagcggtctctttcgctctcggttgtaacacacttgtagcctgctatgctttcaccgtactcgaaaagcgtagcctcatgactagttgtaccaacgccctttcttttcttttttttctcttgacacttcggcgtattcatcgccactggtacaagccgtatggtgcttttttgctcattttcgttttgacgttgcgatggtttcgcggaccaatcgcatgggtggtggtggatgttgtctttgctagttgcaacgtagtcttcttctctcctgcgctttctgacgaaaattggccttacgtatcttttttcggcgtcgttgtcgtcatcgctgttcatataatcgtcgtcactcatatcggcgcttttactgcatgctgtcttttgaagagagtttcattgaaaagtagtgaagaaaaaaaaaaaaaaaaaaaaaaaaaaaaggaaaaaagcttacatacggaaagagaaaaaaaaaaaaagaaattttaa

SEQ ID NO: 191040 - DNA, 753 bp, Saccharomyces pastorianus
atgagtgacgacgattatatgaacagcgatgacgacaacgacgccgaaaaaagatacgtaaggccaattttcgtcagaaagcgcaggagagaagaagactacgttgcaactagcaaagacaacatccaccaccacccatgcgattggtccgcgaaaccatcgcaacgtcaaaacgaaaatgagcaaaaaagcaccatacggcttgtaccagtggcgatgaatacgccgaagtgtcaagagaaaaaaaagaaaagaaagggcgttggtacaactagtcatgaggctacgcttttcgagtacggtgaaagcatagcaggctacaagtgtgttacaaccgagagcgaaagagaccgcttgaaacgaagtcatgaaagcgaaagcagcagtgaaagcgaggtagacgttttcgcctttgaccaggcaaaaggtatcagctctaaggttgaagccgaagaacgctacgcgcgggccgttcgacagtattggcgcatgaccaaagacgagccggctaccttaccactgccaggcacacctaccctagcggctgtgagtttagatatgattgatgacaaaagcgtagaacaattttacacaatgagcagtgccttgatggatgcaaacagactagacttgattcgccgcgatagaatccggtggcacccggacaaacatcgttatcataagtccaaagtcacaaaactgtttcaggccattaacggcctgtgggagcaagaaaagaccgagaaaaggtaa

SEQ ID NO: 191041 - DNA, 1353 bp, Saccharomyces pastorianus
atgtgtttccttctcgagacctcggcgtctcccagatcaaagctcagcaaagattttaaaccgcaatttacgctcctttcatcggtaactaagaagaaaaaaaaaaaagtacgaccacacaatttccagtgtattcattccttaaacttcgtttattttttattcattcattcatttttatttgaatataaccaactactagtccttcctttaaacaaaaatttaccctcccttaatttttcaagaaattccagtatgaaattatccgctctattagctttatcagcctccaccgccgtcttggccgctccagctgtccaccatagtgacaaccaccaccacaacgacaagcgtgccgttgtcaccgttactcagtacgtcaacgcagacggcgctgttgttattccagctgccaccaccgctacctcggcggctgctgatggaaaggtcgagtctgttgctgctgccaccactactttgtcctcgactgccgccgccgctactacctctgccgccgcctcttcttcctcctcttcctcttcctcctcttcctcttcttcctctgttggttctggagattttgaagatggtaccatttcctgttctgatttcccatccggacaaggtgctgtctccttggactggttaggtctaggcggctgggcttccatcatggacatgaacggtaacaccgccacctcttgtcaagacggatactactgttcttacgcttgttctccaggttacgctaagacccaatggccttctgaacaaccttccgatggtagatccgttggtggtttatactgtaagaacggtaaattataccgttccaacaccgacactaacagtttgtgtgtagaaggtcaaggctctgctcaagctgttaacaaggtctccggctccattgctatctgtggtaccgattatccaggttctgaaaacatggtcgttcctaccgtagttggcgctggttcctcccaaccaatcaacgtcatcaaggaggactcctactatcaatggcaaggtaagaagacctctgcccaatactacgttaacaacgctggtgtctctgtggaagatggttgtatctggggtactgagggttccggtgtcggtaactgggccccagttgtcttgggtgctggttacactgatggtatcacttacttgtccatcattccaaacccaaacaacaaagaagcaccaaactttaacatcaagatcgttgccaccgatggctctaccgtcaatggtgcttgctcttacgaaaatggtgtctactctggctctggctctgacggttgtactgtttcagttacttctggttctgctaactttgtcttctactag

SEQ ID NO: 191042 - DNA, 915 bp, Saccharomyces pastorianus
atgaatacttcagaactgtcaatagctgaggaaatcgactacgaagctcttccatcacatgctccgctacattcccagttactggcaggagcatttgcaggtataatggagcattctttgatgtttccaatagatgctctgaaaacccgagtgcaggctgcaggattgaataaagctgcctctacagggatgatatctcagatatccaaaatatctacaatggaaggttcgatggctttatggaagggtgttcaatcggtaatactgggggcagggcctgcgcatgcagtatattttggtacatacgagttttgcaaagctcgcctgataagccctgaagatatgcaaactcatcaaccaatgaagaccgcactgagtggtaccattgctaccattgctgcggatgcattgatgaacccctttgacaccgttaaacaaagactacaattggatactaatctaagagtttggaatgttactaagcaaatatatcaaaatgaaggctttgcagcattttactactcctatcccacaacattggccatgaatatcccatttgcagcgttcaatttcatgatatatgaatctgccagcaaattcttcaacccacaaaattcctacaatccattgattcattgtctttgcggtgggataagtggtgcaacatgtgctgcgttaactacaccgttggattgcataaagactgtattacaggttagaggcagcgaaactgtctccatcgaaataatgaaggatgcgaacacttttggtagagcctcaagagccatactggaggttcatggttggaaggggttttggcgaggtttgaaaccaaggatagtggctaatataccagccactgccatttcttggactgcatatgaatgtgctaagcattttttaatgaaaaattga

SEQ ID NO: 191043 - DNA, 1215 bp, Saccharomyces pastorianus
atgaccattattcagacggttactgaattgggtgttaccgaggacaccattaaggttcagatggctccttccggcggcaaacacctattggcagatcccggtaatcatccagcggagcattttgagagccagatgtcgtggctaaggtttcaaacaaggcagtatctaactagattcacagacaaccaatcagatttcgtacattctttacaaaaaaagcacagaacgccttttagagacgtttatttcaaatacacttcgcttatgggttcccacatgttttatgttatcgtgcttcccatgcctgtgtggcttggataccgcgatttaacacgggacatgatctacgttcttggttattcaatttatttgagtggctacttaaaggattattggtgcctaccaaggccaaaatcaccgccagttgacagaatcacactaagtgaatacactacgaaagaatatggtgcacccagttcacattctgctaacgctactgcggtaagtctattattcttttggagaatatgtttatctgacacactggtatggccaacaaagcttcttttactgagtctggtgatattttactacttaaccctggtttttggtagagtttactgcggtatgcatggtatgctggatttatttagcggcgccgcagttggagctatctgtttttttataagaatctgggtggtgcatgctttacgaaatttccagattggtgaacatctctggtttccccttttgagtgtagcatggggcttgtttattctgtttaaccacgtcaggcccattgatgaatgtccttgtttcgaagatagcgtagcgttcattggcgtagtcagtgggctggattgcagcgactggttaaccgaaagatacggatggaaccttgtatgtagtaggtacgcatcatgtggttctaaggtgttcttgaggcctctggtaggtgtcgcttctgtgattgtttggaaagacgtcattagcaagacagctgtctacacgctgttaattaaactactcagatttcacgatgatagaagcgaaaaggttcatttccataacgagacaagtgaagaagaagagtgtttattgtacagcggtgtttccaaagtggaaatcgtcggaaggtttctcatatacgcaggtatacctacaaccgtctttttgctatgcccagtttttttcacttggacaaacttaaggtag

SEQ ID NO: 191044 - DNA, 586 bp, Saccharomyces pastorianus
atggaaaacgataagggccaattagtatgttcgagaaatctataagattttttatattttaacggatgaatggaaagtgcatggctgtttaaataaatgtaagaaagatatcataatgcaaacaaaacgtaggcatccgcaatgtatggaaaacatacttatggttaccgataataagcaactccgaaggtgccatagaccagctctgaatgcagcctacaaaagttgagcaatttctgacaaaattcttcgattactttcttcacatgtattaaatcatcactcaccaccaccaacaatgtgttttttaaactagcataactaacaaagatttgttttacatcaggtcgaactttacgttccaagaaaatgttctgctaccaacagaatcatcaaggctgatgaccacgcatctgttcaaatcaacgtcgctaaggttgatgaagaaggacgtgctatcccaggtgagtacgttacctacgctttgtccggttacgttagatccagaggtgaatctgatgattctttgaaccgtttggctcaaaacgatggtttgttaaagaacgtctggtcttactcacgttaa

SEQ ID NO: 191045 - DNA, 987 bp, Saccharomyces pastorianus
atgagtaaaaacagggaccctctactggctaatttgaacgctttcaaaagcaaagtgaagtctgccccggtgatcgcacccgctaaagttggacagaagaagaccaatgacacagtgattactatagatggaaacactaggaagaggacggcctccgaacgtgcgcaagaaaacactttgaactctgcgaaaaatcctgtgttagtggatatcaagaaagaagctgggagcaatagctctaatgctatttcattagatgacgacgatgacgacgaagattttggtagctctccttcaaaaaaagtaaggcctggctctattgctgcagccgctttacaagcaaatcaaacagatatttccaagagtcacgattcttcaaagttgctttgggcgactgaatacattcaaaagaaaggtaagcccgttttggtgaatgagttattggactacttgtcaatgaaaaaagatgacaaggttattgagcttttaaaaaaattagatagaatagagtttgaccccaagaaggggactttcaaatacctttccacctacgatgtccattccccttcggaactgctgaagttgttacgttcacaagtaacattcaaaggtatttcctgcaaagacttgaaagacggttggccacaatgcgatgaaacgattaaccaactggaggaagacagcaaaattttggtgttaagaactaaaaaggataaaactccaagatacgtttggtataacagcggtggtaacttgaaatgtattgacgaggagtttgttaaaatgtgggaaaatgtgcaattaccgcaatttgcagaattgccaagaaagctgcaagatttaggtctaaagcctgctagtgtcgatcctgctactatcaaaagacaaacaaagagagttgaagttaaaaagaagagacaaagaaagggtaagattactaacactcatatgaccggtatcttgaaagattattcccatagagtatga

SEQ ID NO: 191046 - DNA, 755 bp, Saccharomyces pastorianus
atgcaaatgtatgttacggcgaatacagaatactatgttcgaaataatatgaggattatacgatagcaaaaaagccataaacgaaagacataaatggaaaatgattgacaagctcacaatttattaaacaagtagcaattgagaaaaactattactcgcggcaagcttctgagtttacattaaatctgtagagcaaattgaaaatgtcgcatatgtgctgaagggtttgtttgttccatcttattttgcataacatagttatatttacttggtcgcataaaaaatattttttactaacgtgaagtttctttctttatgatgtacgcacgcacgtctgtgcttactccataaatgaacttattccaattttgtacagcttcgttaagactttgactggtaagaccatcactttggaagttgaatcttctgacaccattgacaatgtcaagtccaagatccaagacaaggaaggtatcccacctgaccaacaaagattgatctttgctggtaagcaattggaagacggtagaactctatctgactacaacatccaaaaggaatccactttacatttggtcttgagattaagaggtggtatcattgaaccatctttgaaagccttggcttccaaatacaactgtgacaaatctgtttgtcgtaaatgttacgccagattaccaccaagagctaccaactgtagaaagagaaagtgtggtcacaccaaccaattgcgtccaaagaagaagttgaaataa

SEQ ID NO: 191047 - DNA, 3510 bp, Saccharomyces pastorianus
atgcctgtggctgctcgatatatatttttgaccggcctatttttgctatctgtagctaatgttgctctaggtactacagaggcttgtttgccagctggagagaagaaaaatggtatgactataaacttttaccaatattccttaaaagattcatctacatactcaaatccgtcatatatggcctatggttatgctgatgcagaaaaactgggttctgtaagtgggcaaacaaagctttccatcgattattccatcccatgtaatggcgcatcagatacttgtgcttgttccgatgatgatgctactgaatatagcgcttcccaggttgtaccagtgaagcgtggcgttaaactttgttctgataatacaactctttcttctaaaactgagaaacgtgaaaatgacgattgcgatcaaggcgctgcctactggagttcagatctgttcggattctacacaacacccaccaacgtaaccgtggaaatgacaggttactttttaccaccaaaaactggtacctacacatttggcttcgctactgtggatgattcagcaattttatcggttggaggtaatgttgcctttgaatgttgtaaacaggaacagcctcctatcacatcaacggatttcactattaacggtattaaaccatggaacgcagatgcacctaccgacataaaggggtcaacgtacatgtacgccggttactattacccgatcaaaattgtttattcaaatgctgtatcctggggtacgcttcctgttagtgtggtattgccagatggtactgaggttaatgatgattttgaaggatatgttttttcttttgacgataatgctactcaagctcactgttccgttccaaaccctgctgagcatgcaagaacttgtgtatcatctgcaacatcttcctggtcgtccagtgaagtctgtacagagtgtaccgagaccgagtctaccagttatgtgacaccatatgtcactagctcttcctggtcgtccagtgaagtctgtacagagtgcaccgagaccgagtctactagcacctctactccatatgtcaccagctcttcctcgtcgtccagtgaagtctgtacggagtgcaccgaaactgagtctaccagttatgtgacaccatatgtcagctcgtctactgctgccgcaaactacactagctcattctcatcgtccagtgaagtctgtacagagtgcaccgaaactgagtctactagcacctctactccatatgtcactagctcttcctggtcgtccagtgaagtctgtacagagtgcaccgagaccgagtctaccagttatgtgacaccatatgtcagctcgtctactgctgccgcaaactacactagctcattctcatcgtccagtgaagtctgtacagagtgcaccgaaactgagtctactagcacctctactccatatgtcactagctcttcctcgtcgtccagtgaagtctgtacagagtgcaccgagaccgagtctaccagttatgtgacaccatatgtcagctcgtctactgctgccgcaaactacactagctctttctcatcgtccagtgaagtctgtacagagtgcaccgaaaccgagtctactagcacctctactccatatgtcaccagctcttcctggtcgtccagtgaagtctgtacagagtgcaccgagaccgagtctaccagttatgtgacaccatatgtcagctcgtctactgctgccgcaaactacactagctcattctcatcgtccagtgaagtctgtacagagtgcaccgaaaccgagtctacaagcacatccactccatatgcaacctcatctactggcacagctacttcatttaccgcttcaacttccaataccatgacgtctttggtccaaacagacacaaccgtttctttcagcctatcttcaactgtaagcgagcataccaacgctccaacttcatctgtagagtcaaatgctagtactttcatatcgtcaaataaaggcagcgttaaaagttatgttacgtcatccatacatagcattacgcccatgtatcctagtaaccaaaccgtaacatctagctctgttgtctccacaccaattacttccgaatcttctgaatcctcggcctcagttaccattctaccctcaactatcacttctgaattcaaaccatctacaatgaaaacgaaggtcgttagtatctcctcatcaccaactaatttgattaccagctatgacactacatctaaggattcaactgttggttcatccacatcgtctgtaagcctgatctctagtatttctctaccaagtagttattcagcttctagcgaacaaatatttcacagctccatcgttagttcaaacggtcaagcattaacaagtttttcttcgaccaaagtcagttcctcagaatcttctgaatcacatagaacatcgcccactacatccagtgaatcaggcatcaaatcttcaggcgttgaaatcgaatctacaagtacctcttctttcagctttcacgaaacttctacagcctccacctccgttcaaatatcttctcagtttgtgactccatcctcccctatttccacagttgcccctcgttctacagggctcaatagtcaaactgaaagtacaaattcttccaaggaaaccatgtcgtctgaaaatagcgccagcgttatgccttcttcatcagctacatctcccaaaacaggcaaagttaccagtgatgaaacttcttccggattttctcgtgatcgcaccactgtgtataggatgacttcagaaacaccctccacaaatgaacaaacaactttgattactgtaagttcttgtgaatcaaatagctgctcaaacacagtctcaagtgctgtagtttccacggccaccactaccatcaatgggattaccactgaatatactacatggtgccctctttctgctacggaattaacaacggtaagtaaattagagtcagaagaaaaaaccaccctaattacggttacttcttgtgagtctggtgtctgttccgaaactgcttcacctgctatcgtttcgacagccactgctaccgtcaatgatgtcgttacagtttattccacatggagcccacaggctacaaataaactagcggttagttctgacatcgaaaatagtgccagtaaggcttcattcgtttcagaggctgctgagacaaaatccataagcagaaacaacaattttgttccaacttctgggactacttctattgaaacacatacaaccactacaagcaacgcgtctgaaaatagcgacaatgtttctgcttctgaggctgtcagtagcaaaagtgtcacaaatcccgtgttgattagtgtatctcaacagcctcgtggcacaccagcaagtagtatgataggatctagtacagcctctttagagatgtcaagctacctcggcattgcaaatcatctactaaccaatagtggtattagtattttcattgcctccctattactggcaatcgtttaa

SEQ ID NO: 191048 - DNA, 3657 bp, Saccharomyces pastorianus
atgataaaaaatggtacatgcccctattgggaacgtgatgatctttcggaatgtgctaggcgagaatatatcgagtttaaatttcctctatttatattgttgactggtatgatatacgcgttttgcaaagtctttcgagccttttatctaagggggaaaaatcatacaaatgaagcgccagaatttgaagaacaaggtaatggaaaccacgaatatgcaaggttctcagttttaagactaaaatctgcatgggaaagccgtagcttttgtaatgttaataatagatctactttcgacaaattcaaaaaatttatagagggtgccttcattgttttgcagcttactatccacctgtatattttatctagtatgccaatggataacaaaaagttctttcaccaaggttttctggttcaaatgtttctctggattttactgcttgttgttattacacttcgtttaatttcagcaagccagtcatttcggtgggttttagcatgtaagcgtgatttatgggctgtttcgttttactcatatgcatccctgtttactctttcgattttacctcttcgttccgtcttcattggaaagataaaagataaaattatggtcaaatatatcatttccgagactttcattgatttagcgcttttattattattatcaacgtcaagtatagaaggaactaggtactcatttttggttgaaaatgagaacaaaaagttgccaccggctcctaccgtctttggccttcttactttttctaggattgatcggcttatttggaaagcatacaaacactgccttggaaacgctgatatttgggatttggatattaataataagtctatagcaattttggcgaactttgaaatgtcttctaaaaaaggaaggctccttccaaacattatttgttattttaaggctgttttcatctcccaattatttctggcttttgtatctagttttttgaactttgtaccctcattgttgatgccaagaatactatcatacgttaatgacccaaagtcaaaatcatggaacttggtgtctttatacgtctcatctatgctcgtcagtaaaatcattgccacgacttgtagaggtcaaggattgtttttaggtgaaaagggtactatgcaactaagaacagttttgatatccaatatctattccaaaaccttaagaagaacaattctaaaagactcaacaacgtcacttcaaaaaaatgcgtcaacatcctttgaagaaaatcctgactcttctgaagcggaacctagaaaaaagtctagtaggaaagacaactctgtgaacaatgttatgtcaattgacgctttcaaggtttctgaagctatgaacactttttatctggcatgtgaagcagttttcatgacagttacggccctaatgatactatattccctactgggatggtccgcctttgctggtacctttgctcttcttgccatgattcctttgaatttttggtgtgcaactttttacgggaactatcaggccgatcaattaatcctaactgacaagcgtacctctgggattagtgaggctctgaactcaatacgtgtaataaagctactggcatgggaaaatctgttttatcaaaagattataaacgtaagagatggggaaataagactccttaaaaagaaggcaacaattttctttttgaaccatctcatttggttctttgggcccactttggtctctgcaataacattctcagtgtttattaaattccaaaatcagacacttactcctacaatagcatttacagctctttctttatttgcaatattgaggacacccatggaccaaattgcttcgactgtcagccttttgatacagtcttttatttctcttgaaagaatccaggattatcttaatgaatcagaaacaagaaaatatgagattttggaacaaagcaatactaaatttggctttgaagatgcaagcatggaatgggaagctgctgaaacaagttttaaacttaagaacatttctattgattttaagctgaatagtctcaacgcaattataggtccgactgggtcaggaaagtcttcgctattacttggactattgggagaattgaaccttctttctggaaaaatatacgtacctacagttgaatcccgcgacgacttagagattggtaaagacggaatgacgaattcaatggcatattgttctcaaactccgtggttgattagtggaacaattaaagataacgttgtttttggagaaatcttcaacaaacaaaaatttgatgatgtaatgaaatcctgttgtcttgacaaagatatcaaagcaatgacagctggcataagaacagacgtgggtgatggaggattttccttatctggcggacagcagcaaaggattgctttagccagagcaatttactcctcttccaggtatttgatccttgatgattgcttgagtgcagtagatcctgaaactgcactttatatatatgaagagtgtttatgcggccccatgatgaaaggaaggacctgcatcattacgagtcataatatttctttagttacgaaacgggctgactggcttgtgattttagatcgtggcgaggtgaaatcacagggtaaaccatcggacctcattaaatctaatgagtttttgagggaaagcataaacaatgattcaaaaaatacaactcacaatcaaattgacttgaaaagatcaacaacatcaaagaaaactaagaatggagatcccgagggagggaactcgcaagacgaagtgtgtgctgaagttgaaaattttgaggaaacaaaaatggaaggatcagttaaattttcagcttacaaatggttagcagactatttcgggggactgggagttgtttttgttttcacctcgtcctccatccttattcatggaatcacactgtctcagggcttttggctcagatactggctggacactggatcttcagggagtaagtctacctggctttatagaatagttgagggtcactctaacatctatttcttactgacttatattatcataggtcttgtttcttcatttttaacttctggtaaagtttggatagcaataatttcaggtaccaacgtcaccaagaaaatatttgcgaagcttctatccagtatcttatatgccaagttacgttttcataatgtcacgccgactggaagaataatgaacagatttagcaaggatatggatattattgatcaacaattgatccctaatttcgaaggactctcttatagcgtcgttgtttgtctgtggattatacttttaattggatatgttactcctcaatttctgttatttgctattcctttatgcgctctttattataccgtatgtacgttatatcttcgtgcatctagagagttgaagagaatagataacatcaatatctctccaatacaccagttattcgctgaagccatcaaaggagtaactacaattagagcattagcagatgagcgtaggtttatcactcaatctttggttgcaattgacagaagtaatgctccatttttttatctcaatatggccaccgagtggatcacatatagagtggatataattgggacacttgttctttttagttcttctgtaatgatcataatgaaggcctcatag

SEQ ID NO: 191049 - DNA, 921 bp, Saccharomyces pastorianus
atgagttcagtagagagaataaaagaatatacagatataccttccgaatcaaacggctacatatcacctccagctaattggcctcaaacaggagatgttgaactaaaaaacttatcattgcgctattctcctcattcctctaaggcactagataatgtatcattcaaggtaaaagcaggaacaaaagttggtattgttggtagaacaggggctgggaaatcttctattatagcggctatttaccggctttcagactgggaaaacggtacgattactattgataacaaagacataaaacatatccctttagagcgtttaagaaattctataagctgcatcccacaggatcctactttatttgatggaactgttcgatctaatttagatcctttcgatcggtattctgatgtacaaatttatggcgtactatccaaagtgggattaattgaagaatgcgatgaattgtgcttgatttttgagcaagagcagcctaatttttctagtcataaactaagaaatagattcattgatttgaatactgttgtgaaatcaggtggttcaaacttatctcaagggcaaagacaacttttgtgcttggcacgatccatgcttggtgcacgtaatataatgctaattgacgaagcaaccgcctcaatagattatatttctgatgctaaaattcagaaaactataagagaaacaatgaaaaatacaacaattttgactattgctcatcgattaaggtcagtaatagattatgacaaaattctggtgatggaaatgggcagagtcaaggagtatgatcatccatacactctaatatctgatcgaaataccattttttaccgcctctgtaggcagagtggcgagttcgaaaaccttttcgagttggctaaagtctcattcgataataaaagataa

SEQ ID NO: 191050 - DNA, 327 bp, Saccharomyces pastorianus
atgagctcaaatgaagaggtatttactcagataaacgcaactgcgaatgtggttgataataagaagcgtttacttttcgtgcaagatagctcagcacttgttctagggcttgttgcaggatttttgcaaatcgagtcagtccatgggtttatttggttcctgattctgtacaacttgattaatgtcatttacattgtttggatctgtcaacttcaaccaggaaagttctaccaaagcccacttcatgacatttttttcgaatcgttttttagagagataactggttttgtcatggcatggacatttggatacgccctaatcggatga

SEQ ID NO: 191051 - DNA, 4680 bp, Saccharomyces pastorianus
atgtcttcactagaagtggtagatgggtgcccctatggataccgaccatatccagatagtggcacaaatgcattaaatccatgttttatatcagtaatatccgcctggcaagccgtctttttcctattgattggtagctatcaattgtggaaactttataagaacaataaagtaccacccagatttaagaactttcctacattaccaagtaaaatcaacagtcgacatctaacgcatttgaccaatgtttgctttcagtccacgcttataatttgtgaactggccttggtatcccaatctagcgatagggtttatccatttatactaaagaaggctctgtacttgaatctccttttcaatttgggtatttctctccctactcaatacttagcttattttaaaagtacattttcaatgggcaaccagcttttctattacatgtttcaaattcttctacagctcttcttgatattgcagaggtactatcatggttctagtaacgaaaggcttactgttattagcggacaaactgctatgattttagaagtgctccttcttttcaattctgtggcaatttttatttatgatctatgcatttttgagccaattaacgaattatctgaatactacaagaaaaatgggtggtatccccccgttcatgtactatcctatattacatttatctggatgaacaaactgattgtggaaacttaccgtaacaagaaaatcaaagatcctaaccagttaccattgccgccagtagatctgaatattaagtcgataagtaaggaatttaaggctaactgggaattggaaaaatggttgaatagaaattctctttggagggccatttggaagtcatttggtaggactatttctgtggctatgctgtatgaaacgacatctgatttactttctgtagtacagccccagtttctacggatattcatagatggtttgaacccggaaacatcttctaaatatcctcctttaaatggtgtatttattgctctaacccttttcgtaatcagcgtggtttctgtgttcctcaccaatcaattttatattggaatttttgaggctggtttggggataagaggctctttagcttctttagtgtatcagaagtccttaagattgacgctagcagagcgtaacgaaaaatctactggtgacatcttaaatttgatgtctgtggatgtgttaaggatccagcggtttttcgaaaatgcccaaaccattattggcgctcctattcagattattgttgtattaacttccctgtactggttgctaggaaaggctgttattggagggttggttactatggctattatgatgcctatcaatgccttcttatctagaaaggtaaaaaagctatcaaaaactcaaatgaagtataaggacatgagaatcaagactattacagagcttttgaatgctataaaatctattaaattatacgcctgggaggaacctatgatggcaagattgaatcatgttcgtaatgatatggagttgaaaaattttcggaaaattggtatagtgagcaatctgatatattttgcgtggaattgtgtacctttaatggtgacatgttccacatttggcttattttctttatttagtgattctccgttatctcctgccattgtcttcccttcattatctttatttaatattttgaacagtgccatctattccgttccatccatgataaataccattatagagacaagcgtttctatggaaagattaaagtcattcctacttagtgacgaaattgatgattcgttcatcgaacgtattgatccttcagcggatgaaagagcgttacctgctatagagatgaataatattacatttttatggaaatcaaaagaagtattaacatctagccaatctggagataatttgaggacagatgaagagtctattatcggatcttctcaaattgcgttgaagaatatcgatcattttgaagcaaaaaggggtgatttagtttgtgttgttggtcgggtaggagctggtaaatcaacatttttgaaggcaattcttggtcaacttccttgcatgagtggttctagggactcgataccacctaaactgatcattagatcatcgtctgtagcctactgttcacaagaatcctggataatgaacgcatctgtaagagaaaacattctatttggtcacaagttcgaccaagattattatgacctcactattaaagcatgtcaattgctacccgatttgaaaatactaccagatggtgatgaaactttggtaggtgaaaagggcatttccctatcaggcggtcagaaggcccgtctttcattagccagagcggtgtactcgagagcagatatttatttgttggatgacattttatctgctgttgatgcagaagttagtaaaaatattattgaatatgttttgatcggaaagacggctttattaaaaaataaaacaattattttaactaccaatactgtatcaattttaaaacattcgcagatgatatatgcgctagaaaacggtgaaattgttgaacaagggaattatgaggatgtaatgaaccgtaagaacaatacttcaaaactgaaaaaattactagaggaatttgattctccgattgataatggaaatgaaagcgatgtccaaactgaacaccgatccgaaagtgaagtggatgaacctctgcagcttaaagtaactgaatcagaaactgaggatgaggttgttactgagagtgaattagaactaatcaaagccaattctagaagagcttctctagctacgctaagacctagaccctttgtgggagcacaattggattccgtgaagaaaacggcgcaaaaggccgagaagacagaggtgggaagagtcaaaacaaagatttatcttgcgtatattaaggcttgtggagttttaggtgttgttttatttttcttgtttatgatattaacaagggttttcgacttagcagagaatttttggttaaagtactggtcagaatctaatgaaaaaaatggttcaaatgaaagggtttggatgtttgttggtgtgtattccttaatcggagtagcatcggccgcattcaataatttacggagtattatgatgctactgtattgttctattaggggttctaagaaactgcatgaaagcatggccaaatctgtaattagaagtcctatgactttctttgagactacaccagttggaaggatcataaacaggttctcatctgatatggatgcagtggacagtaatctacagtacattttctccttttttttcaaatcaatactaacctatttggttactgttatattagtcgggtacaatatgccatggtttttagtgttcaatatgtttttggtggttatctatatttactatcaaacattttacattgtgctatctagggagctaaaaagattgatcagtatatcttactctccgattatgtccttaatgagtgagagcttgaacggttattctattattgatgcatacgatcattttgagagattcatctatctaaattatgaaaaaatccaatacaacgttgattttgtcttcaactttagatcaacgaatagatggttatccgtgagattgcaaactattggtgctacaattgttttggctactgcaatcttagcactagcaacaatgaatactaaaaggcaactaagttcgggtatggttggtctactaatgagctattcattagaggttacaggttcattgacttggattgtaaggacaactgtgacgattgaaaccaacattgtatcagtggagagaattgttgagtactgcgaattaccacctgaagcacagtccattaaccctgaaaagaggccagatgaaaattggccatcaaagggtggtattgaattcaaaaactattccacaaaatacagagaaaatttggatccagtgctgaataatattaacgtgaagattgagccatgtgaaaaggttgggattgttggcagaacaggtgcagggaagtctacactgagcctggcattatttagaatactagaacctaccgaaggtaaaattattattgacggcattgatatatccgacataggtctgttcgatttaagaagccatttggcaattattcctcaggatgcacaagcttttgaaggtacagtaaagaccaatttggaccctttcaatcgttattcagaagatgaacttaaaagggctgttgagcaggcacatttaaagcctcatctggaaaaaatgctgcacagtaaaccaagaggtgatgattctaatgaagaggatggcaatgttaatgatattctggatgtcaagattaatgagaacggtagtaacttgtcagtggggcaaagacaactactatgtttggcaagagcgctgctaaaccgttccaaaatattggtccttgatgaagcaacggcttctgtggatatggaaaccgataaaattatccaagacactataagaagagaatttaaggaccgtaccatcttaacaattgcacatcgtatcgacactgtattggacagtgataagataattgttcttgaccagggtagtgtgagggaattcgattcaccctcgaaattgttatccgataaaacgtctattttttacagtctttgtgagaaaggtgggtatttgaaataa

SEQ ID NO: 191052 - DNA, 342 bp, Saccharomyces pastorianus
atgtattttgcatttaaaggattatgcgggagaagatttctgcccattgcctcttttcttactatattgaatagaatattattccaatactggcttttttacaattcattaaaagaggaaaagacatttcagaaaattttcttctctatgaaccttaaatgtaggaaaaaaaaggaaccaaaccacatcatttactctcaaccgcctttcttgttggggttcatggtacaattgcaaagttgtgtcaagttgttgccactctatcttttgtttttgttacagggtaatggcgcacattatgcaagcgcgatgacgagcaaggtactttcttttttcctttaa

SEQ ID NO: 191053 - DNA, 381 bp, Saccharomyces pastorianus
atgctttctaggcttattcaacacataacctcaattttcgttttctcattcttttttctttttttttttttctcactaaagcgttgtcctagagatgtaaaaagagaaggaaatgaaatttttactggaaatgttactactattacacaggtttatttagaaagtacaaacgtgtcagcgtatttagggtgtcaatgcaacaatattgaaactatcatttgtcttcagaatagcggcaataccaccatctccgcataccacgtccatatcagtgaaatcggcagtgtcgctttgcaaacagagggcgctctcctcgtctttagtccaattttttgttttcttgtcaaatttgtatatcgtcagcgaattgctctcgtttga

SEQ ID NO: 191054 - DNA, 744 bp, Saccharomyces pastorianus
atgcctttgttagataccttcaagagttttattcaatcaccgacggaatcaaaggtgaaacaggctaccaacgaggacgaaacaagtggagcaacggggacgcttatgaacgaaatatcaatcttgacctacagccccaagacagtacgagaaatcatccaggtaatccggaagcgattgctacttgggcagaacagaagaaattctcatcgaaattgtatccaggtgatgaagacgctgactttggtctcatatctgatgaataacgggtccaatgaattcatcaagtggctgaaaggaaacatgatactaattgagatcctggaggattttcaggttcaggatcctcgggatgaacgtaaggcggaagatattcaaaagctaagcaggaacgttctggggctgctgcaagacgacgggttactagaaaaacaacgcaaggatgtaatacaattccgctcaagcatatcgactccgggcaggaagtccacggacaatagccatttgaagctggaggaaatgagaagcgagctcacgcgacaaagcttagaaaagaaagcaaagcctcccaccaccagcactagcttagatttccagagacaacggacaaggaatacgcacgaatatgcccgattctctttggatcccctggccgaagaagacagtgaagatacgcccggcgtggcgggtggaataagcaagctctcatttagacccaagtcttcaaataacccgttcagatga

SEQ ID NO: 191055 - DNA, 2010 bp, Saccharomyces pastorianus
atgagtaatcctcaaaaagctctaaacgactttctgtccagtgaatctgttcatacacatgatagttctaggaaacaatctaataagcagtcatccgacgaaggacgctcttcatcacaaccttcacatcatcactctggtggtactaacaacaataataacaataataataataataataacagtaacaacaacaacaacggcaacgatgggggaaatgatgacgactatgattatgaaatgcaagattatagaccttctccgcaaagtgcgcggcctactcccacgtatgttccacaatattctgtagaaagtgggactgctttcccgattcaagaggttattcctagcgcatacattaacacacaagatataaaccataaagataacggtccgccgagtgcaagcagtaatagagcattcaggcctagagggcagaccacagtgtcggccaacgtgcttaacattgaagatttttacaaaaatgcagacgatgcgcataccatcccggagtcacatttatcgagaaggagaagtaggtcgagggctacgagtaatgctgggcacagtgccaatacaggcgccacgaatggcaggactactggtgcccaaactaatatggaaagcaatgaatcaccacgtaacgtccccattatggtgaagccaaagacattataccagaaccctcaaacacctacagtcttgccctccacataccatccaattaataaatggtcttccgtcaaaaacacttatttgaaggaatttttagccgagtttatgggaacaatggttatgattattttcggtagtgctgttgtttgtcaggtcaatgttgctgggaaaatacagcaggacaatttcaacgtggctttggataaccttaacgttaccgggtcttctgcagaaacgatagacgctatgaagagtttaacatccttggtttcatccgttgcgggcggtacctttgatgatgtggcattgggctgggctgctgccgtggtgatgggctatttctgcgctggtggtagtgccatctcaggtgctcatttgaatccgtctattacattagccaatttggtgtatagaggttttcccctgaagaaagttccttattactttgctggacaattgatcggtgccttcacaggcgctttgatcttgtttatttggtacaaaagggtgttacaagaggcatatagcgattggtggatgaatgaaagtgttgcgggaatgttttgcgtttttccaaagccttatctaagttcaggacggcaatttttttccgaatttttatgtggagctatgttacaagcaggaacatttgcgctgaccgatccttatacgtgtttgtcctctgatgttttcccattgatgatgtttattttgattttcattatcaatgcttccatggcttatcagacaggtacagcaatgaatttggctcgtgatctgggcccacgtcttgcactatatgcagttggatttgatcataaaatgctttgggtgcatcatcatcatttcttttgggttcccatggtaggcccatttattggtgcgttaatgggggggttggtttacgatgtctgtatttatcagggtcatgaatctccagtcaactggtctttaccagtttataaggaaatgattatgagagcctggtttagaaggcctggttggaagaagagaaatagagcaagaagaacatcggacctgagtgacttctcatacaataacgatgatgatgaggaatttggagaaagaatggctcttcaaaagacaaagaccaagtcatctatttcagacaacgaaaatgaagcaggagaaaagaaagtgcaatttaaatctgttcagcgcggcaaaagaacgtttggtggtataccaacaattcttgaagaagaagattccattgaaactgcttcgctaggtgcgacgacgactgattctattgggttatccgacacatcatcagaagattcgcattatggtaatgctaagaaggtaacatga

SEQ ID NO: 191056 - DNA, 351 bp, Saccharomyces pastorianus
atgctacagtatataccactctcaaacttaccctactctcacattccactccatcacccatctctcaccatcagtaccaaatgcactcgcatcattatgcacggcacttgcctcagcggtttataccctgtgccatttacccataaagtccatcattatccacattttaatatctatatctcattcggcgaccccaaatattgtataactgcccttaatacatacgttataccacttttgcaccatatactaaccactcaatttatacacacttatttcaatatacccacaaaatcaccaccaaaatcacctaaacataaaaattatttatctttcaactttacgaaataa

SEQ ID NO: 191057 - DNA, 615 bp, Saccharomyces pastorianus
atgggtgcctacaaatatttggaagaattgcaaagaaagaagcaatctgatgttttgagattcttgcaaagagtcagagtctgggaatacagacaaaagaatgtcattcacagagccgctagaccaactagaccagacaaggctagaagattgggttacaaagctaagcaaggtttcgttatctaccgtgtcagagttagacgtggtaacagaaagagacctgttccaaagggtgctacttacggtaagccaactaaccaaggtgtcaatgaattgaaataccaaagatccttgagagctaccgctgaagaaagagttggtcgtcgtgccgctaacttgagagtcttgaactcctactgggttaaccaagattctacttacaagtacttcgaagttatcttggtcgaccctcaacacaaggctatcagaagagatgctcgttacaactggatctgtgacccagttcacaagcaccgtgaagctagaggtttgactgccactggtaagaaatccagaggtatcaacaagggtcacaaattcaacaacaccaaggctggtagaagaaagacctggaagagacaaaacactttgtccttgtggagatacagaaaataa

SEQ ID NO: 191058 - DNA, 792 bp, Saccharomyces pastorianus
atggaaggtgaacaaattatggagtatgttcaagagacaccgatcattccaaaaaggattatccattattcgattccaaaacaaatgatcacaaagcccgctccccatgtcgagatgacgttggtagctaatacttttcgggacatggacttgccgcagcatccggttatccatgattgttggcaaaataaagagtactcaactcaaagatattcaggaaatgtggctcaacagagattaagttttgaggaacatccaaatgaagagtgtcaaaattctgttgggttaatcaagagagtgagtactttctttaaaaagaggccattgtctcgaaagaatagcataaagtcaatcggtgacgtaaaatcggaggcacgtaaccggggagaaggcctcctgggtgaagttgataatcttaacgagcagaatgtccgagaaaacctgactagtgaacatgaaaagagtcctgaaggagattccaaaaggtatggcctgttctcctttgaagagaccccccctatacaagtgttggagcagggcaatatcaattctgagctttcttcatttaaaaacacttctttggcggaaaacaaacgctcttctgacagcttcgtttcgttaaaaccgggtgaagatgaacatagccctttagagattagtacgtgtggtaatttgactgaaagagaggatttgcaatctggcgaagaacggtttgactcagcagcccaaaatataaaggtagcttcgatgaaggaaaaaaaaaaaatcttcaaagggaacaaaacagattaa

SEQ ID NO: 191059 - DNA, 378 bp, Saccharomyces pastorianus
atgaatttattcttcgtcttcttcttcgtcttcttctggagtgacttggtagaaggccaatctgtattcgttggtcttggtagagacaaatctgatccagtctctcaattggttcttcttcaagtacttctttgtcaagtacttcaagtacttaccagagaacttggcagtggaaacaacagtaacaacggtaccatcttcagtgacagtgacagcgttacccaagttaccgacagcaccttcgaccttgatgtggtcgatcaagtacttagcgtaggaagctgggtcgaagacaccgttttcagttggagaagagacatcgacggtaaaggtcttggcaatcttttgctttctggaagtctatatcaaaaaaattaa

SEQ ID NO: 191060 - DNA, 1947 bp, Saccharomyces pastorianus
atgatgttggagccttcacctccacctttaacaacaacggtaacaccctcccttccgtccagtttaaagaaatctgtgacagataatgaccagaataataacaacgtgcccaggaagagaaaactagcatgccagaattgccgtagaagaagaaggaaatgtaacatggaaaagccttgttcaaactgtatcaagtttcgtaccgaatgtgtattcactcaacaagacttaaggaacaaaagatattctacgacttacgtagaagctttacagagccagattcggtctttgaaagaacagttgcaaatattaagttcctcgtcttccacaattgctagcaatgctctctcctcgttaaaaaacaacagtgatcatggtgatgctcctaatgaaaaaatcttaaagtatggcgaaacagcacaatcagcactaccatcatctgaaagcaacgatgagaatgagtctgatgcgttcaccaagaaaatgccttccgagagccctccaccagttggcacaaatagtatatatccatcaaattccttgtctataataaaaaagaagacggatggaagcacaagatatcagcaacagcaggtcagcctaaaaaatttatcaagaagtccccttatcttaagatcgttgtcactctttttcaaatggctatacccgggacattaccttttcattcatagagaaactttcttaagtgctttcttcggtgatactaacactaaaagttactattgttccgaagaattggtatttgcaatcgctgcattgggatctttgatttcatacaaatcagaaactgagctttttcaacaatctgaagtgttttatcaaagagccaagacgatagtactcaaaaaaatttttcaactggaagattcttcgttagctgaatcgtcgtcctcttcgaaattagcaatcatccagactctattgtgtttggcattttatgacattggaagcggagaaaaccccatggcttggtatctttctgggctggcatttaggattgcccacgaaatcggcctacatttgaatccagaagcatggagtaatgtttatgaagacgagctgtcaataatggattttgaagtgagaagtagaatttattggggctgctacattgctgatcatttaatagcgatcctctttggaagatcaacttccttgcgtttgtccaattccactgttccagaaacagacgagctacctgaaattgagactggtatagaggagtacatatatgacccaaaagtaatattgtccactgcaaaccccttgaagaaactgattgtgttatcgagaataacggagatttttgcatccaagattttcagcccaaacgaaactctacttcaaaggagtgaatacttggccaaatttaatctggaggtatacaattggagaagggatttgccccctgaactacaatggaccaagaggtcattgatggaaatgacagattttaacccaaccatagcttacgtatggtttcattactatatcgtgctaatttcctataataaacctttcatatacgaaatcaaacaaagccgggaattggttgaaggttatgttgatgaactgtattatcttttaaaagtttggaaaaataaatttaagacgtttgagaaggccacaatttacatgatttattctgcgattttagccatccaatgcatgaagtccaacttgattaaaaaggatagaaaacaagacttcttaaattttttaagtgcgcctaccctgaattacgaacttgctagaaaattcatagaaaactctgaagatgctttgcataattcagaaactatggatttattagggactctatctcacggtaacgattttgccttagagtacaattttgactttactttattgaatgagattgatatgctgattggtggaaacaccaatgatggtttgtcgaagtaa

SEQ ID NO: 191061 - DNA, 264 bp, Saccharomyces pastorianus
atggcagatagcgaggatacctctgtgatcctgcagggcatcgacacaatcaacagcgtggagggcctggaagaagatggttacctcagcgacgaggacacgtcactcagcaacgagctcgcagatgcacagcgtcaatgggaagagtcgctgcaacagttgaacaagctgctcaactgggtcctgctgcccctgctgggcaagtatataggtaggagaatggccaagactctatggagtaggttcattgaacactttgtataa

SEQ ID NO: 191062 - DNA, 1215 bp, Saccharomyces pastorianus
atgggaagtttgttgagaccggttgatctggtaaatcaaccgcttggattccaagaaagatataaaattttgcagaaattattcaagcagctacaaaaggcatatgcacacacaaaaggaactaatattgaccttgaaagacttgccactcgcttagaagtccatgttgctaaaaacagcttgtctggtcagagttacaagtttaacatgagcattttactgcgggatgtgcttaaatataaaggagatctctcgaagatcaaaattaatgggcgcccccttaaaggagctaagcctcatttatcctcaattggtaatgcaaactctatcactacaaaatcaaaagcgatggaagctttaaaggctctgattttggattcgaaggtcttagagaaaaatgggtatattgttaaggaaatgcaaaataaaactaatgatgacaatagtacgcaactgtatgcaccttgtttgcgttgcagctcaaatttcaaaaaaacagacatcatggaaaagactctatgtaggtatcaccctttgaaaagaatatacaacagagataccaagaaccatcagtatccatgctgtggtgaaactactgattccgtttcttttctaaggctaggatgcaagacgttttttcaccatgtgtttagaggagaatcatatgacgagttatgcaaaatttcgaagttttctagtacagatgacattgatggtgttgagaatgttctttctcttgactgtgaaatggcttttacatcattgggctatgagatgatacgtttaacaattgtggattttttcaccggcaagacactatttgatcatgtaattcagccaataggggatattgtcgatctgaattcagacttcagtggtgtccatgagattgaccgaaccaattgcccgacgtacaaggaggcacttgatgtttttttatccgaaaacttaataaataaaaatagtattcttatagggcacggactagagaacgatctgaacgtcatgaggctatttcataataaggttatagatactgcaatactttattcaagaacaaagtttaaggtttctttgaagaacttagcgtttgaagttttgagtagaaaaatccaaaatggcgagcatgatagttctcaagatgcaatagcaacgatggacgttgttaaagtcaaaataggtatttctccaagtcaaaacaagtgggaaaaataa

SEQ ID NO: 191063 - DNA, 1932 bp, Saccharomyces pastorianus
atgtggaaattcaacaaaaagctcgcccgtcttacttaccgtctttattcaagctcaggcccaagctcgccccttcatgggaagaagaaactgccgcaaaatctgaaattcgtcgtcttgaaccctacccaatctgggctagtgaaaaatgatcagaagcagcctagacacaggccgtctaagaaacgtagccataaggaaactggagataacaacctcgatttcggctcgaaactccttgtcttcgaaaagcagaattcactagattccgcattgaactccatccgattgaagaaaccgacaagcgccagtctgccctccctggaatacaatgcccttctccaatcgcttacatcaagctacaatcgctaccaactgcgcgagttcatctccacacatcagccagactcctcttcacatctgacgcactggaagaaaagcaagctgtcccaatatataattgaaaaaatctggaattgccaaccaatttcaacacccaccactcccacaggcatcaagtccacatcattgactttccagttcgattctcctagagaaattttccttttactcatcactcaaaatggtaaaatactcaccaacttcaataagctcgggctgacattcatcatctccattcaggataacgaattgaccgtcaagggttcgcctagcttgctcaaatacgcagaaatatccttaaacaaaatatggtcaaacatcactcatgaaaatgtgcgtatgtattccctcatgccatcaaaagacgtcatcaaccttattcagaaggaaactcacactttttttgaatacctcccggacttgcaaatgtacaagatttcagccctaagcaccaagaaaatatccatggccaaagtctttttattaaatgccgtcgcttctaatcctaacacaactcaacaccaccacacaatagcctcaccagcactcaagacagaactctatccgttcaacaatactctagagaacttggactggctaaacaagtcacaagattgggcaagattacagtcagttgtccctaaaaattgcacagatctgatgactcccactgaaaacgccacaccagaattgacagatgcgcaggtcagccaattcgaatcttccttgtctaaaaatataccatctctctccccttccgactctatttcccaatctttatcaataacgctaggtcactccttacagtccgcgtctttttctagtattttccaacctctaatacataagagttttatttcaaaattactgaatctaccaatgtacaaagaatcatcatcatcagccgtacctgtgcctgtgcctcttgatcaacatctaataacaaatgcgcatcaatccttcatacagctgaacttcactcctgtgccgcccacctctggctcctcctcgtccccttttttgcagatttggttcgagattgacgaattcgataacattgttaccacctcaatgaggcctcttttgaaattacaagaaaattctgttatcttaagaactccacaatgccagacagactataagatcacgtcagattacattcaagatcttttacctgatttcgaccagaccaatccggatgcttggttatctgaacaaaaaggcctccaagaatttcttctcaagtcacactggaagttaaacaaatatcagaatcttatgaaaaaaatcaacatttctttaccagataacctaatacagcaataccaattgactgatgttttgacccatcgtgtcttgaatttacgatttcctacgaacactgcccaagatgataaatacatcattcaatattcagatatcagccgcggatttttgaacaatggctcctacagacaattagatttcatcaatgtgaaccccagtgaaacctcactaaaaacctttatcaatgatgttttaagcttttaa

SEQ ID NO: 191064 - DNA, 327 bp, Saccharomyces pastorianus
atgcttactctatattttctccagtgccttcaagctccgtatatattatgtactagttttattacattaaagatacataactttttttttttttttcagttcactgaaataagaaaaggcgggcgaggtgaaaaacaaaaaaaaaagtatagagaaacagaagtggaagaagagctaggaaagcacagcgcatacgacggtcacctaggatggagcaccaacaattgcggaagtacgtcgaattgtacaataaggaggtcgaggaattctacaatggtgccgcgtcaggccgcccagctgagttccatccttccaaagtacatgtaa

SEQ ID NO: 191065 - DNA, 1431 bp, Saccharomyces pastorianus
atgatagcttccaaaagctccttattagttactaaatcgcgcataccctctctatgctttcctttgataaagaggtcctatgtgtcaaagactccgacacactctaacacggctgctaatctgatggttgaaactccggccgccaatgccaacggcaatagtgtgatggcacctcctaactcaatcaattttctacagacacttcccaagaaggaactattccaactgggattcatcggtattgcgaccttgaacagcttcttcctgaacacgatcattaagttgttcccttacatccccatcccagtaataaaattcttcgtctcttctttatactgtggcggtgagaactttaaagaggtcatcgaatgcggcaaacgtctgcagaagagaggtatatcgaacatgatgctttcattaactattgaaaattccgaaggtacaaagagtttgtccagtactccagtagaccaaattgtcaaggaaacaatcagctctgtccacaacatcctactgcccaatattattggccagctggaatctaagccaatcaatgacattgctccaggttatatcgctctaaaaccctctgctttggtcgataaccctcacgaggttctgtacaatttcagtaatcccgcctacaaggctcaaagggatcagctgatcgagaactgctctaagattacaaaagagatttttgaactaaatcaatctttgttaaagaagtaccctgaaagaaaggccccatttatggtttccactattgacgctgagaagtatgatttgcaggagaatggtgtttacgaattacagagaatcttatttcaaaaattcaatcccacttcatctaaactgatatcatgtgtcggtacttggcagttgtacctaagggactctggtgaccatattttgcacgaattgaagctggcccaagaaaacggctataagcttgggctgaaactggttcgtggtgcttatattcattctgaaaaaaaccgtaaccaaattatctttggcgataaaacgggcactgacgaaaattacgatcgtatcatcactcaagttgtcaatgatttaatcatcaatggcgaggattcttattttggtcacttggttgtcgcctctcataattaccaatcccaaatgctcgttactaatttgctaaaatctacccaagacaactcttatgccaaatcgaacattgtgttggggcaattactaggtatggcagataatgttacctatgacctaattaccaaccatggcgctaaaaacataatcaagtatgtcccatggggcccaccattggaaactaaagattatcttttgagaagattgcaagaaaacggggatgctgtgagatctgataatggctggccattaatcaaggccatagcaaagtcgattccaaaaagagtaggcctatga

SEQ ID NO: 191066 - DNA, 2340 bp, Saccharomyces pastorianus
atgtgttacagtaggcaagccattcctccacctgttcctaatagacctggcggtactaccaatagaggacctcctcccttaccacctcgcgcaaatgttcagccaccagtttgttcttctgagaactccagtaaacctcgagaaaatagggtggcaggtgaatcactgcgcacaccaagcagttctaaccctttagctgacagccaggtgaatagtgacaatatttttcaatcacctgtcctttctaacttaaaagctcctccttccgtcttcaacaaagttcaacacccggtaccaaagccgaatattgatgatcaatctgttgatccattggagacaaacaagttctacacaaacatgttattagacgataatacacaacctatatggacacatccttattcaatttggttttctcgtgatccagaattgtttggtttggccgccaatcatactttagcgtctcaaagggtttttgatacaactacaaatcctcccagattctacttcaatcccacaaatataaaatcatttgtattcaaggccagggaatttgtctcttcaaatgatatcaagcttgaattccgggatatgaaacatatgtccatgtgcttactaatgtctttgagtagttcccagtttatagaattcccgctggttcaggggatgggctttgtcacggctatttaccacgatttgggttttgaattaagaagcgccgttggtttcaggagcttagagcgcataagcgtgaatgaaagatatggtaaatataatatacaacttgagaataataggaattggatactttatttgacctcacctgattactcttttccacaagattttcaaatttcattactcgacagcaatacaataatatcatctcataaaatcaatggtcttatctgtcaattatctgcagactccgtccccagtattgacatggcagcgggctgttatccagtatactgtgacctatcagggcaaactgttgatgaacatttcacaaattacagatttaactatacggttgcaggctactcgcagtctggaactactctaatgtatgctttaccacatcataaagcggcattcacaccagaaatgcaggaacgtgaaattgcctcaagcctggattccacagttaaaggcttaatgactggttatctcacaaacagttttgatatgcaggttcaagtacctcaagaattgggctttgaacctgtcgcgttatctttgaataagaaggcagattacagtcaagaaaagctatctaaaattcgggaagctgctgttcaagaagttcaattgagtgaccctcaacaagaatcaaacatagattctatgtatttctctggtaagatacttgcaaagtatgcgtggattctttatgtgacacattacatccttcatgatgaaaatttaacaaaagaattattatctaaactgactattgcaatggagagattcatcagcaatcagcaagtcttacctttaaattacgacgttagttggaaaggcataatttcatcaggctcttctagccaagactttggtaactcttattataatgatcatcattttcattactcttatcatgtcataacggctgccattatctctttagtcgattctgatttaagtggagttactaacaactcctggttagaaaataatagagattgggttgagtgcttaattagagattactctggtgttgacaacgatgatccgtacttccctcaatttaggtcatttgattggtttaatggccattcatgggccaaaggactatttccaagtggtgacggtaaagatgaagaatctacttcagaagatgtcaattcttgctatgcgataaaattgtgggggttggtaactggaaattctaagttaactgacatagcgaacttacaactcggcatcatgagaaatgttttccagagctacttcctatacgaaagcaataatactgtccaaccgaaagaatttattggtaataaagttagtggtattttattcgaaaataaaattgatcacgccacgtattttggcatggagcctcaatacattcatatgattcacgccattcctataacatcagcatcttcatgggtcagaacaccaaattttgtcaaagaggagtgggaagaaaaaatgcagccgataattgatcaagtgaatgacggttggaaaggaataatcatgttaaatatggctctgcttgatccaaaattttcgtacgactttttcagccaacctgatttcaacagaaatttcctagacaatgggcaaagcttaacttggtctttagcttattcaggtgctttttcttag

SEQ ID NO: 191067 - DNA, 606 bp, Saccharomyces pastorianus
atggatgagatggataatgtgatacgatctctggagcaagaatatcggttaatattgctcttgaaccataggaacaaaaatcaacatagagcggctagctggtatggatcgttcaatgagatgaaaagaaattgtggacaaataataacgctttttagctcgagaagattacaagccaaacgccttaaagatgttgaatgggtcaagttgcacaggctattacagagagcactttttagacagttaaagagatggtactggcagttcaatggcgtaattgcgctgggacaatttgtaacgttgggttgtacactagtaacattgctggcaaatgtgagggcactgtatatgagattatgggagattaatgaaactgagtttataagatgtggatgcttaataaagaacttaccgagaacaaaagcaaaatcggttgtgaacgatgtcgaagaacttggagaaattatagatgaagatattggcaacaacgttcaagaaaacgaactagtgataacgtctataccaaagcctctgacagagaactgtaagaagaaaaagaaaaggaaaaagaagaacaaatcagccattgatggcatattcggataa

SEQ ID NO: 191068 - DNA, 150 bp, Saccharomyces pastorianus
atgtggagacgtcggcgcgagccctgggaggagttatcttttcttcttaacagcttatcaccccggaattggtttatccggagatggggtcttatggctggaagaggccagcacctttgctggctccggtgcgcttgtgacggcccgtga

SEQ ID NO: 191069 - DNA, 375 bp, Saccharomyces pastorianus
atgcgagattcccctacccacaaggagcagagggcacaaaacaccatgtctgatcaaatgcccttccctttcaacaatttcacgtactttttcactctcttttcaaagttcttttcatctttccatcactgtacttgttcgctatcggtctctcgccaatatttagctttagatggaatttaccacccacttagagctgcattcccaaacaactcgactcttcgaaggcactttacaaagaaccgcactcctcgccacacgggattctcaccctctatgacgtcctgttccaaggaacatagacaaggaacggccccaaagttgccctctccaaattacaactcgggcaccgaaggtaccagatttcaaatttga

SEQ ID NO: 191070 - DNA, 165 bp, Saccharomyces pastorianus
atgctcttactcaaatccatccgaagacatcaggatcggtcgattgtgcacctcttgcgaggccccaacctacgttcactttcattacgcgtatgggttttacacccaaacactcgcatagacgttagactccttggtccgtgtttcaagacgggcggcatataa

SEQ ID NO: 191071 - DNA, 186 bp, Saccharomyces pastorianus
atggtttgtattcacactgaaaatcaaaatcaagggggcttttacccttttgttctactggagatttctgttctccatgagccccccttaggacatctgcgttatcgtttaacagatgtgccgccccagccaaactccccacctgacaatgtcttcaacccggatcagccccgaatgggaccttga

SEQ ID NO: 191072 - DNA, 204 bp, Saccharomyces pastorianus
atgccccctggaataccaaggggcgcaatgtgcgttcaaagattcgatgattcacggaattctgcaattcacattacgtatcgcatttcgctgcgttcttcatcgatgcgagaaccaagagatccgttgttgaaagtttttaatattttaaaatttccagttacgaaaattcttgtttttgacaaaaatttaatgaatagataa

SEQ ID NO: 191073 - DNA, 141 bp, Saccharomyces pastorianus
atgctcttgccaaaacaaaaaaatccattttcaaaattattaaatttctttaatgatccttccgcaggttcacctacggaaaccttgttacgacttttagttcctctaaatgaccaagtttgtccaaattctccgctctga

SEQ ID NO: 191074 - DNA, 1089 bp, Saccharomyces pastorianus
atgagatctttaaatacccttttactttctctctttgtcgcaatgtccagtggtgctccactactaaaaattcgtgaagagaagaattcttctttgccatcaatcaaaatttttggtaccggcggtactatcgcttccaagggttcgacaagtgcaacaacggcgggttatagcgtgggattaaccgtaaatgatttaatagaagccgtcccatctttagctgagaaggcaaatctggactatcttcaagtgtctaacgttggttcaaattctttaaactatacgcatctgatcccattgtatcacggtatctccgaggcactagcctctgatgactacgctggtgcggttgtcactcatgggaccgacactatggaggagacagctttcttcttagatttgaccataaattcagagaagccagtatgtatcgcaggcgctatgcgtccagccactgccacgtctgctgatggcccaatgaatttatatcaagcagtgtctattgctgcttctgagaaatcactgggtcgtggcacgatgatcactctaaacgatcgtattgcctctgggttttggacaacgaaaatgaatgccaactctttagatacattcagagcggatgaacagggatatttaggttacttttcaaatgatgacgtggagttttactacccaccagtcaagccaaatggatggcaattttttgacatttccaacctcacagacccttcggaaattccagaagtcattattctgtactcctatcaaggcttgaatcctgagctaatagtaaaggccgtcaaggacctgggcgcaaaaggtatcgtgttggcgggttctggagctggttcctggactgctacgggtagtattgtaaacgaacaactttatgaagagtatggtataccaattgttcacagcagaagaacagcagatggtacagttcctccagatgatgccccagagtacgccattggatctggctacctaaaccctcaaaaatcgcgtattttgctacaattatgtttgtactccggctacggcatggatcagattaggtctgttttttctggcgtctacggtggttaa

SEQ ID NO: 191075 - DNA, 345 bp, Saccharomyces pastorianus
atgaagttccaatatgcgttggccaaggaacagctaggcagcaactcgcgcagtggcgtcaaaaaactaataagtaaacaccactggcttccggaatactatttctctgatctctcattttctgttgtacagcagtgggacagtagagccattgaaaaaactacaatcatatcttgtatgcggcccgcaaaccaagagatttatcctttgagacattgtgagaccctccgttcgcaaccgtgctctctgttttcatcactatatgcacgctctttccaaagctcctgcactttgcacgtggcggagccatcgcccggcttccatatgtacggctgccacacctaa

SEQ ID NO: 191076 - DNA, 5269 bp, Saccharomyces pastorianus
atggaatcccaacaattatctcaacattcacccatttctcatggtagcgcctgtgcttcggttacttctaaggaagtccacacaaatcaagatccgttagacgtttcagcttccaaaacagaagaatgtgagaaggcttccactaaggctaactctcaacagacaacaacacctgcttcatcagctgttccagagaacccccatcatgcctctcctcaacctgcttcagtaccacctccacagaatgggccgtacccacagcagtgcatgatgacccaaaaccaagccaatccatctggttggtcattttacggacacccatctatgattccgtatacaccttatcaaatgtcgcctatgtactttccacctgggccacaatcacagtttccgcagtatccatcatcagttggaacgcctctgagcactccatcacctgagtcaggtaatacatttactgattcatcctcagcggactctgatatgacatccactaaaaaatatgtcagaccaccaccaatgttaacctcacctaatgactttccaaattgggttaaaacatacatcaaatttttacaaaactcgaatctcggtggtattattccgacagtaaacggaaaacccgtacgtcagatcactgatgatgaactcaccttcttgtataacacttttcaaatatttgctccctctcaattcctacctacctgggtcaaagacatcctatccgttgattatacggatatcatgaaaattctttccaaaagtattgaaaaaatgcaatctgatacccaagaggcaaacgacattgtgaccctggcaaatttgcaatataatggcagtacacctgcagatgcatttgaaacaaaagtcacaaacattatcgacagactgaacaataatggcattcatatcaataacaaggtcgcatgccaattaattatgagaggtctatctggcgaatataaatttttacgctacacacgtcatcgacatctaaatatgacagtcgctgaactgttcttagatatccatgctatttatgaagaacaacagggatcgagaaacagcaaacctaattacaggagaaatctgagtgatgagaagaatgattctcgcagctatacgaatacaaccaaacccaaagttatagctcggaatcctcaaaaaacaaataattcgaaatcgaaaacagccagggctcacaatgtatccacatctaataactctcccagcacggacaacgattccatcagtaaatcaactactgaaccgattcaattgaacaataagcacgaccttcaccttaggccaggaacttactgaatctacggtaaatcacactaatcattctgatgatgaactccctggacacctccttctcgattcaggagcatcacgaacccttataagatctgctcatcacatacactcagcatcatctaatcctgacataaacgtagttgatgctcaaaaaagaaatataccaattaacgctattggtgacctacaatttcacttccaggacaacaccaaaacatcaataaaggtattgcacactcctaacatagcctatgacttactcagtttgaatgaattggctgcagtagatatcacagcatgctttaccaaaaacgtcttagaacgatctgacggcactgtacttgcacctatcgtaaaatatggagacttttactgggtatctaaaaagtacttgcttccatcaaatatctccgtacccaccatcaataatgtccatacaagtgaaagtacacgcaaatatccttatcctttcattcatcgaatgcttgcgcatgccaatgcaccgacaattcgatactcacttaaaaataacaccatcacgtattttaacgaatcagatgtcgactggtctagtgctattgactatcaatgtcctgattgtttaatcggcaaaagcaccaaacacagacatatcaaaggttcacgactaaaataccaaaattcatacgaaccctttcaatacctacatactgacatatttggtccagttcacaacctaccaaatagtgcaccatcctatttcatctcatttactgatgagacaacaaaattccgttgggtttatccattacacgaccgtcgcgaggactctatcctcgatgtttttactacgatactagcttttattaagaaccagtttcaggccagtgtcttggttatacaaatggaccgtggttctgagtatactaacagaactctccataaattccttgaaaaaaatggtataactccatgctatacaaccacagcggattcccgagcacatggagtcgctgaacggctcaaccgtaccttattagatgactgccgtactcaactgcaatgtagtggtttaccgaaccatttatggttctctgcaatcgaattttctactattgtgagaaattcactagcttcacctaaaagcaaaaaatctgcaagacaacatgctggcttggcaggacttgatatcagtactttgttacctttcggtcaacctgttatcgtcaatgatcacaaccctaactccaaaatacatcctcgtggcatcccaggctacgctctacatccgtctcgaaactcttatggatatatcatctatcttccatccttaaagaagacagtagatacaactaactatgttattcttcagggcaaggaatccagattagatcaattcaattacgacgcactcactttcgatgaagacttaaaccgtttaactgcttcatatcattcgttcattgcgtcaaatgagatccaagaatccaatgatcttaacatagaatctgaccatgacttccaatccgacattgaactacatcctgagcaaccgagaaatgtcctttcaaaagctgtgagtccaaccgattccacacctccgtcaactcatactgaagattcgaaacgtgtttctaaaaccaatattcgcgcacccagagaagttgaccccaacatatctgaatctaatattcttccatcaaagaagagatctagcaccccccaaatttccaatatcgagagtaccggttcgggtggtatgcataaattaaatgttcctttacttgctcccatgtcccaatctaacacacatgagtcgtcgcacgccagtaaatctaaagatttcagacactcagactcgtacagtgaaaatgagactaatcatacaaacgtaccaatatccagtacgggtggtaccaacaacaaaactgttccgcagataagtgaccaagagactgagaaaaggattatacaccgttcaccttcaatcgatgcttctccaccggaaaataattcatcgcacaatattgttcctatcaaaacgccaactactgtttctgaacagaataccgaggaatctatcatcgctgatctcccactccctgatctacctccagaatctcctaccgaattccctgacccatttaaagaactcccaccgataaattctcgtcaaactaattccagtttgggtggtattggtgactctaatgcctatactactatcaacagtaagaaaagatcattagaagataatgaaactgaaattaaggtatcacgagacacatggaatactaagaatatgcgtagtttagaacctccgagatcgaagaaacgaattcacctgattgcagctgtaaaagcagtaaaatcaatcaaaccaatacggacaaccttacgatacgatgaggcaatcacctataataaagatattaaagaaaaagaaaaatatatcgaggcataccacaaagaagtcaatcaactgttgaagatgaaaacttgggacactgacgaatattatgacagaaaagaaatagaccctaaaagagtaataaactcaatgtttatcttcaacaagaaacgtgacggtactcataaagctagatttgttgcaagaggtgatattcagcatcctgacacttacgactcaggcatgcaatccaataccgtacatcactatgcattaatgacatccctgtcacttgcattagacaataactactatattacacaattagacatatcttcggcatatttgtatgcagacatcaaagaagaattatacataagacctccaccacatttaggaatgaatgataagttgatacgtttgaagaaatcactttatggattgaaacaaagtggagcgaactggtacgaaactatcaaatcatacctgataaaacagtgtggtatggaagaagttcgtggatggtcatgcgtatttaagaatagtcaagtaacaatatgtttatttgttgacgacatgattttattcagcaaagacttaaatgcaaataagaaaatcataacaacactcaagaaacaatacgatacaaagataataaatctgggtgaaagtgataacgaaattcagtacgacatacttggcttagaaatcaaatatcaaagaggtaaatacatgaaattaggtatggaaaactcattaactgagaaaatacccaaattaaacgtacctttgaatccaaaaggaagaaaacttagcgctccaggtcaaccaggtctttatatagaccaggatgaactagaaatagatgaagatgaatacaaagagaaggtacatgaaatgcaaaagttgattggtctagcttcatatgttggatataaatttagatttgacttactatactacatcaacacacttgctcaacatatactattcccctctaggcaagttttagacatgacatatgagttgatacaattcatgtgggacactagagataaacaactgatatggcacaaaaacaaacctaccgagccagataataaactagtcgcaataagtgatgcttcgtatggcaaccaaccgtattataaatcacaaattggcaacatatatttacttaatggaaaggtaattggaggaaagtccaccaaggcttcattaacatgtacttcaactacggaagcagaaatacacgcgataagtgaatctgtcccattattaaataatctaagttacctgatacaagaacttaacaagaaaccaattattaaaggcttacttactgatagtagatcaacgatcagtataattaagtctacaaatgaagagaaatttagaaacagattttttggcacaaaggcaatgagacttagagatgaagtatcaggtaataatttatacgtatactacatcgagaccaagaagaacattgctgatgtgatgacaaaacctcttccgataaaaacatttaaactattaactaacaaatggattcattag

SEQ ID NO: 191077 - DNA, 165 bp, Saccharomyces pastorianus
atgatagttgatttctattccaacactttgagacattgtgagaccctccgttcgcaaccgtgctctctgttttcatcactatatgcacgctctttccaaagctcctgcactttgcacgtggcggagccatcgcccggcttccatatgtacggctgccacacctaa

SEQ ID NO: 191078 - DNA, 357 bp, Saccharomyces pastorianus
atgcagcacacgcttacccggaccgcctctctgccagaacgctcgagcagcgcccacagcgccgctactgcgttacccgcacttcgccgcccgccagacagctgcgagactctcgtcccgctactgtgtatcttttggttcgtcttcgttagtatgagcccgctcccgccggctcgtgccaacaaatcagacaacaaaggcttaatctcagcagatcgtaacaacaaggctactctactgcttacaataccccgttgtacatccaagtcgtatacaaatgatttatccccactcaaaatgacattgctatccgccggcaagcacccaaggcctttccgccaagagcaccgttgctag

SEQ ID NO: 191079 - DNA, 822 bp, Saccharomyces pastorianus
atgagacatggctttatatacagacagggtattctggcgtactattatgtgttcgatgccatcgagcaagagatagatcgcctactgaatgaccccgtaacggaggaggagctgcaaacttcgaccattctgaagcagttttggctcgaagattttagaagatctacgcagatctataaggacctgaagctgctatactcaaacacgtttaaaagcacagaatcattaaacgaattcctggctacgttccagaagccaccgctactacagcagtttatcaataacatccacgaaaacatacacaaggagccatgcaccattctttcttactgtcacgttctgtacttggcgcttttcgccggcggcaagctaatacgatcgaatttgtacagaagactggggctcttccccaacttcgagaagctatcacagaaggaactggtcaaaaagggcacaaacttcttcaccttcagcgatctgggtcccactgaagaaacacgcttgaaatgggaatacaagaagaactatgagctggccaccaggacggaattgaccgaagcacaaaagttgcagatcattagcgtcgcagaaggcatttttgattggaacttcaacatcgttgcagaaattggagagttgaatcgtcgcgagttaatgggcaagttcagcttcaagtgtattacgtacttgtacgaagaatggatgttcaacaaggattctgctactagaagagcactccacacggtcatgctgctggtgctttctattatcgcgatctgggttctttacttcttggtaaagagttttcttagcatagtataa

SEQ ID NO: 191080 - DNA, 2502 bp, Saccharomyces pastorianus
atgataacactcttattatacctgtgcgtaatatgtaacgcaatagtgttaataagggctgattcgatagcggacccttggcctgaagcgcgacatctactaaataccatagctaagtccagagacccaatgaaagaagctgctatggaacccaatgcagatgaatttgttggattctatgtaccgatggattattccccacgtaatgaggaaaaaaactaccagagcatttggcaaaacgaaatcacagattctcaacgtcatatttatgaattacttgtacaatcaagtgaacaattcaacaactcagaagcaacatatacacttagccagattcacctttggagtcaatataatttcccgcataatatgactttggcacacaaatacttagaaaaattcaatgatctaacccacttcaccaatcattcggccatcttcgacttagctgtgatgtatgccactgggggatgtgcttctggtaatgatcaaaccgtgatccctcaggattctgctaaagcactgctatattaccaaagggctgcccaactagggaatttaaaggctaagcaagtgctagcttataaatactattctggcttcaatgtcccacgaaattttcataaatctttagtattgtacagggacattgctgaacagctgagaaagtcgtactccagggacgaatgggatattgtcttcccctattgggaaagttacaacgtgagaatatcggattttgagagtggcctattaggtaaaggtttgaattccgttccatcttctacagtaaggaaaagaactacgagaccagatattggttcaccctttattgcgcaagttaacggtgtacagatgaccttgcaaatcgaaccgatgggtaggttcgctttcaacggtaacgatggcaacataaatggcgacgaagatgacgaggatgccagtgaaagacgaatcattcggatatattatgcagctttgaatgattataaaggaacatattcacaaagcagaaattgtgagcgcgccaaaaacttgttggaattaacgtacaaggaatttcagcctcatgtcgacaatttggatcctttgcaagtattttactacgtccgttgcttacaattattggggcacatgtatttcaccggcgaaggctcctcgaagcctaatattcatatggccgaagagatcctgaccacgtcgctagaaataagcagaagggcacagggacctataggtagagcgtgcatagatctgggcttaataaatcaatacatcacaaacaatatttctcaagcaatttcgtattatatgaaagctatgaaaacacaagctaacaatggaatcgtagaattccaattatccaaattggccacttcattccctgaagaaaaaatcggcgacccatttaacttaatggaaactgcctacttgaatggattcattccagccatatatgagtttgcagtaatgatcgaatctggaatgaacagtaagagtagtgtggaaaacactgcttacctgttcaaaacattcgttgacaaaaacgaagctattatggcacctaaactgaggacagcatttgccgcattaatcaacgatcgttcagaagtggctttatgggcttattcccaactagccgagcaaggctacgagactgctcaagtctctgccgcctacttaatgtaccagttgccatatgagtttgaggatcctccaagaaccacagatcagagaaaaactttggcaatttcctactatacaagagcgtttaaacagggaaatatagatgctggtgttgtcgcgggagatatctattttcagatgcagaattacagtaaagctatggctctttatcagggtgcagctttgaagtactctatacaggctatctggaacttagggtacatgcatgagcatgggctaggtgtaaacagagatttccatcttgctaaacgttactacgaccaagtttcagaacacgatcatagattttacttggcttccaaattgagtgttttaaaattacacctaaagtcatggttgacttggatcaccagagaaaaagtaaactactggaaaccttcctcgccacttaaccctaacgaagatactcagcactcgaagacttcatggtacaagcaattgacgaagattctacaaagaatgagacataaggaggatagtgacaaagctgcggaagattctcacaaacacagaactgtagtgcagaatggagctaaccataggggtgacgaccaagaggaggcttccgagattttgggcttccaaatggaggatcttgttacgatgggatgtatcttggggatattcctattaagtatattaatgagtacactggcggcccgtagaggctggaatgtccgtttcaatggagcacaattaaatgcaaatggtaaccggcagcaagagcaacaacaacaacaacaagcacaaggtcccccgggctgggacttcaatgttcagatattcgccatatga

SEQ ID NO: 191081 - DNA, 936 bp, Saccharomyces pastorianus
atgagtgatatcttgaacgtaagtcaacaacgtgaagcaattaccaaggccgctgcgtatatttctgctattttagaaccacatttcaaaaatacaacaaatttcgagcctccgagaactttgattatatgtggttcagggcttggtggaatatctaccaagctgtctagagacaatccacccccggtaacagtcccataccaagacatcccaggattcaagaaaagtacggttccaggtcattccggtacactaatgttcggatctatgaatggttcaccagtagtattaatgaatggtcgtcttcatggatatgaaggcaacacattgtttgagactacttttcctattagagtgcttaaccacatgggtcatgttcgtaatttaattgtcactaatgccgctggtggtataaacgcgaaatatcaagcctgcgatttgatgtgcatttatgatcatttaaatatccctggccttgctggccagcacccattgagaggtcctaacttggatgaagatggacctcgttttttagccttgagtgatgcatatgatctggagttgaggaagcttttatttaagaaatggaaagagctcaagattcaaaggccactgcatgaaggtacttatacttttgtatctggacccactttcgaaacaagagcagaatccaaaatgataaggatgttgggaggagatgctgtcggaatgagtactgttcccgaagtcattgttgcaagacattgcggatggagggttttggccttaagtttgattaccaatacttgcgtggtggatagccctgccagtgcgttggacgaatcacctgtacccttagaaaaaggcaaagcgactcacgctgaagtactggagaatggtaaaatcgcctctaatgacgtgcaaaacttaattgctgccgtaatgggggaattataa

SEQ ID NO: 191082 - DNA, 5269 bp, Saccharomyces pastorianus
atggaatcccaacaattatctcaacattcacatatttctcatggtagcgcctgtgcttcggttacttctaaggaagtccacacaaatcaagatccgttagacgtttcagcttccaaaacagaagaatgtgagaaggcttccactaaggctaactctcaacagacaacaacacctgcttcatcagctgttccagagaacccccatcatgcctctcctcaacctgcttcagtaccacctccacagaatgggccgtacccacagcagtgcatgatgacccaaaaccaagccaatccatctggttggtcattttacggacacccatctatgattccgtatacaccttatcaaatgtcgcctatgtactttccacctgggccacaatcacagtttccgcagtatccatcatcagttggaacgcctctgagcactccatcacctgagtcaggtaatacatttactgattcatcctcagcggactctgatatgacatccactaaaaaatatgtcagaccaccaccaatgttaacctcacctaatgactttccaaattgggttaaaacatacatcaaatttttacaaaactcgaatctcggtggtattattccgacagtaaacggaaaacccgtacgtcagatcactgatgatgaactcaccttcttgtataacacttttcaaatatttgctccctctcaattcctacctacctgggtcaaagacatcctatccgttgattatacggatatcatgaaaattctttccaaaagtattgaaaaaatgcaatctgatacccaagaggcaaacgacattgtgaccctggcaaatttgcaatataatggcagtacacctgcagatgcatttgaaacaaaagtcacaaacattatcgacagactgaacaataatggcattcatatcaataacaaggtcgcatgccaattaattatgagaggtctatctggcgaatataaatttttacgctacacacgtcatcgacatctaaatatgacagtcgctgaactgttcttagatatccatgctatttatgaagaacaacagggatcgagaaacagcaaacctaattacaggagaaatctgagtgatgagaagaatgattctcgcagctatacgaatacaaccaaacccaaagttatagctcggaatcctcaaaaaacaaataattcgaaatcgaaaacagccagggctcacaatgtatccacatctaataactctcccagcacggacaacgattccatcagtaaatcaactactgaaccgattcaattgaacaataagcacgaccttcaccttaggccaggaacttactgaatctacggtaaatcacactaatcattctgatgatgaactccctggacacctccttctcgattcaggagcatcacgaacccttataagatctgctcatcacatacactcagcatcatctaatcctgacataaacgtagttgatgctcaaaaaagaaatataccaattaacgctattggtgacctacaatttcacttccaggacaacaccaaaacatcaataaaggtattgcacactcctaacatagcctatgacttactcagtttgaatgaattggctgcagtagatatcacagcatgctttaccaaaaacgtcttagaacgatctgacggcactgtacttgcacctatcgtacaatatggagacttttactgggtatctaaaaggtacttgcttccatcaaatatctccgtacccaccatcaataatgtccatacaagtgaaagtacacgcaaatatccttatcctttcattcatcgaatgcttgcgcatgccaatgcacagacaattcgatactcacttaaaaataacaccatcacgtattttaacgaatcagatgtcgactggtctagtgctattgactatcaatgtcctgattgtttaatcggcaaaagcaccaaacacagacatatcaaaggttcacgactaaaataccaaaattcatacgaaccctttcaatacctacatactgacatatttggtccagttcacaacctaccaaaaagtgcaccatcctatttcatctcatttactgatgagacaacaaaattccgttgggtttatccattgcacgaccgtcgcgaggactctatcctcgatgtatttaccacgatactagctttcattaaaaaccaatttcaggccagtgtcttggttatacaaatggaccgtggttctgagtatactaacagaactctccataaattccttgaaaaaaatggtataactccatgctatacaaccacagcggattcccgagcacatggagtcgctgaacgactaaaccgtaccttattagatgactgccgtactcaactgcaatgtagtggtttaccgaaccatttatggttctctgcaatcgaattttctactattgtgagaaattcactagcttcacctaaaagcaaaaaatctgcaagccaacatgctggcttggcaggacttgatatcagtactttgttacctttcggtcaacctgttatcgtcaatgatcacaaccctaactccaaaatacatcctcgtggcatcccaggttacgctctacatccgtctcgaaactcttatggatatatcatctatcttccatccttaaagaagacagtagatacaactaactatgttattcttcagggcaaggaatccagattagatcaattcaattacgacgcactcactttcgatgaagacttaaaccgtttaactgcttcatatcattcgttcattgcgtcaaatgagatccaagaatccaatgatcttaacatagaatctgaccatgacttccaatctgacattgaactacatcctgagcaaccgagaaatgtcctttcaaaagctgtgagtccaaccgattccacacctccgtcaactcatactgaagattcaaaacctatatctgaaatcaatcttcgtgcacccagagaagttgaccccaacatatctgaatctaatattcttccatcaaagaagagatctagcaccccccaaatttccaatatcgagagtaccggttcgggtggtatgcataaattaaatgttcctttacttgctcccatgtcccaatctaacacacatgagtcgtcgcacgccagtaaatctaaagatttcagacactcagactcgtacagtaacaatgagactaatcatacaaacgtaccaatatccagtacgggtggtaccaacaacaaaactgttccgcagataagcgaccaggagactgagaaaaggattatacaccgttcaccttcaatcgatgcttctccaccggaaaataattcatcgcacaatattgttcctatcaaaacgccaactactgtttctgaacagaataccgaggaatctattatcgctgatctcccacttcccgatccgcctccagaacctcctaccgaattatcagactcctttaaagaacttccaccgatcaattctcgtcaaactaattccagtttgggtggtattggtgactctaatgcctatactactatcaacagtaagaaaagatcattagaagataatgaaactgaaattaaggtatcacgagacacatggaatactaagaatatgcgtagtttagaacctccgagatcgaagaaacgaattcacctgattgcagctgcaaaagcagtaaaatcaatcaaaccaatacgaacaaccttaagatacgatgaggcaatcacctataataaagatattaaagaaaaggaaaaatatatcgaagcataccacaaagaagtcaaccaactattgaaaatgaatacttgggacactgacaaatattatgacagaaaagaaatagaccctaaaagagtaataaactcaatgtttatcttcaacaagaaacgtgacggaactcataaagctagatttgttgcaagaggtgacattcagcatcctgatacgtacgatacaggtatgcaatccaacactgtacatcattatgcgttgatgacatccctgtcacttgcattagacaataactactatattacacaattagacatatcttcggcatatttgtatgcagacatcaaagaagaattatacataagacctccaccacatttaggaatgaatgataagttgatacgtttgaagaaatcacattatggattgaaacaaagtggagcgaactggtacgaaactatcaaatcatacctgataaaacagtgtggtatggaagaagttcgtggatggtcatgcgtatttaagaatagtcaagtaacaatttgcttattcgttgatgatatgatattgttcagcaaagacttaaatgcaaataagaaaatcataacaacactcaagaaacaatacgatacaaagataataaatctgggtgaaagtgataacgaaattcagtacgacatacttggcttagaaatcaaatatcaaagaggtaaatacatgaaattaggtatggaaaactcattaactgagaaaatacccaaattaaacgtacctttgaatccaaaaggaagaaaacttagcgctccaggtcaaccaggtctttatatagaccaggatgaactagaaatagatgaagatgaatacaaagagaaggtacatgaaatgcaaaagttgattggtctagcttcatatgttggatataaatttagatttgacttactatactacatcaacacacttgctcaacatatactattcccctctaggcaagttttagacatgacatatgagttaatacaattcatgtgggacactagagataaacaactgatatggcacaaaaacaaacctaccgagccagataataaactagtcgcaataagcgatgcttcatatggtaaccaaccatattacaagtcacaaattggtaacattttcctactcaacggaaaagtgattggaggaaagtcgacaaaggcttcgttaacatgcacttcaactacagaagcagaaatacacgcagtcagtgaagctattccgctattgaataacctcagtcaccttgtgcaagaacttaacaagaaaccaattattaaaggcttacttactgatagtagatcaacgatcagtataattaagtctacaaatgaagagaaatttagaaacagattttttggcacaaaggcaatgagacttagagatgaagtatcaggtaataatctatacgtatactacatcgagaccaagaagaacattgctgatgtgatgacaaaacctcttccgataaaaacatttaaactattaactaacaaatggattcattag

SEQ ID NO: 191083 - DNA, 324 bp, Saccharomyces pastorianus
atgcatactatttgccttagaagcccgatcgatgaatcctctcctcttccatataaatcaataaggcaacctctagaaaacgcccattcctgccaagcgctttgcagccttatggccgtactctgtgcatccgctgctcatcggctctctgaaaccttccctatgcgtttggtagtcgcgcgtgaatatgctaattggggcgccttccaacatgcgtttacgcggcgcgctggagcttctgtggcggcgacttctgcatggtttgatgcagttgcggctggtactgaaaatgcacatatgcagtcagctgaatcatgcaattaa

SEQ ID NO: 191084 - DNA, 1797 bp, Saccharomyces pastorianus
atgagtttcggtagtaaagtctccagggctttgagatttttggaaattcctgtcaaagacagggcatctgtgagtttcttgaagaacccggatttgcaacctattaagtcggctaaccaaacatgggggttctggtctaattttgcatattggggtgttatgtccttttcagtgggtacatggatgagtgcctcttctgcactaggtgttggattaagttacccagaaaccattggtacatttatcgtcggtgatgtgttgaccattattttcacattggcaaactcgtgtcctggttacgactggaaggtcggtttcactttggcccaaagattcgtctttggtatttacggttctgccttcggtatcatcatcagaattttgatgagtattgtcaactacgggtccaacgcttgggtgggaggtctttgtatcaatatgatcttggattcatggtctcaccattatttgcacctgccaaacaccttatcttcgaaagttgccatgaccactaaagaattaattggttttatcatcttccacgtccttactgcattctgttacttaatgaaaccctaccacatgaactacattttaatttggtcgtgtgttgctacatttttctctatgttgggtatggtgatctatttagctaaacaggctcacggtgttggagaattgtttacctccactaaatccactgccactggctccaccaaagcttgggcttgggtttatatgatctcgtactggttcggttccgtttctccaggttccaccaaccaaagtgattactcgagatttggttcctccaattgggctatctgggccggtaccatctgtgcattgttaattccaaccactttaatcccagtttttggtgttattggtgcctccacctgtgacaaactatacggtgaacaatattggatgcctatggatatcttcaaccattggttgacaactaactattctgcaggtgctcgtgccggtgcgttcttctgtggtctttcatttgtcctatctcaaatgtcctacaccatctccaactgtgggtttgccagtggtatggatttggccggtttattacccaagtatgtcgacatcaagaggggtgccctttttgccgcatgtgtctcctgggcttgtttgccatggaacttctacaactcttcttctactttcttgactgtcatgagttctttcggtgttgtcatgactcctatcatttctgtcatgatttgcgataacttcttgatcagaaaaagacaatactccatcactaatgcctttattctcaagggtgaatactatttcactaagggtgttaactggagagctattgttgcctgggtttgtggtatgacccccggtctacctggtattgcttgggaagtcaataatgactatttccacaacactggtattgtcaatttcttttacggtgactccttcttctcgtttttgatctcctttttcgtctattggggactatgcctcctcttcccattcaaaattactgtcaaacatgatgacaaagattattatggtgcctttactgacgaagaagcaagaaagaagggcatggttccatacagtgaaatttctgaagaagaaatccgcgcttacacattaggcgaaggttacactaccggccacgagtacagacctgaaggctccgacgatgaaatacctgagttggtcaaaactagctctgaaaacaccaatgagtttgaaatagttcatcataagaataatgaaaagcaatcctccaccgccagtgaaaaagctgcttag

SEQ ID NO: 191085 - DNA, 1437 bp, Saccharomyces pastorianus
atgactggtcctggacctgaaataaataaggaggagcaccccagttctccgggcaagaaacagataacatataatagtatacccaagaatgcaaatctaattgatggatctacgaattcatcgaagaggccaattgaaaagtatgacaagagaatagccgacccaacaaaaagctattttccacatagcatatcaagaacaccaaggagaaaatatacttacattctagtcctcacatcactaaatggaacttttgagagcaaacatgtggtgataccatttaaaccagatggtttgaaattgggaaggcctgttgctaatagtaatagcagctccagttcatcgctcaggggcggtaaaagagtggattcacacactttttcccaagtaaggtccgataatggtaatttcgattcaagagtactctccaggaatcatgcattgttaagttgcgacccgctcacgggtaaggtatatatacgagacttaaaatccagtaatggtacgttcattaacggtcaaagaattggctcaaatgacgtagaaatcaaagttggcgatgtgatagacttgggaacagatatagatacgaaaattgagcatcgaaaaataagtgccacagttgaagaactatttgtacaacctttattagaatcaccgatttttgaaaatgaagatagtgatgattgccatacaattacagaaaaagaggaggctgctgccataacaagtcacatatatggtgattccaacaacctagaattggaagaagttatcctgggctctgatacagaaatactgagtggaatttttattaataattgtattggtacgagcccgactttatctaatatcatcaaaaccctggcaatggaaattccattttccaaatgcgataattttaaattacagtcgatggagaatttcttaattaattatacgacacatctagaatacacgaacaaacttttagtggaaaaaaatgatcagcaactggtaaagctgcaaaatggattaagaaggaaactgtcggggaaatacgaaaagattatcgaacaaaacagaaatcaagtaaaacagttggaaagggaccatatgtttttcaaaaagtcatttgaagtgaagaaaagaagaaataatgaaaagcaaaaaagcatggaaagggaaatagaagacttgaaaactaggttagaagtggaacgatataagaattcacaaatgatgaagaagaacaaacagaaagaacaagaactctcaactgcatctaaaaaaaagactaccgaacatgacactagaggcgtcccgggcatgaatcctaagggtactgacaaatttagcatcaagaacacgctatgtaatcatttcacactattaacatttggaactatttccatcgggattatagctattgtcttcaagatcctttcccccaactag

SEQ ID NO: 191086 - DNA, 429 bp, Saccharomyces pastorianus
atgaaagtaggtggcatagaagacagacaactggaagccttaaaaagggcggcactgaaggcgtgtgaactctcctatagcccctattctcacttccgtgtcggttgttccatattaacaaataacgatgttatcttcactggtgctaatgtcgagaatgcaagctacagtaattgtatatgtgcagaacgatctgctatgatacaagttctaatggcaggccatcgctcaggatggaaatgcatggtcatttgtggcgattctgaggaccagtgtgtttccccttgcggcgtttgcaggcagtttatcaatgaatttgtggtcaaggactttccaatagtcatgcttaattccacaggttctcgttctaaagtcatgacaatgggagaactgctgcccatggcttttggtccatctcatttaaactag

SEQ ID NO: 191087 - DNA, 594 bp, Saccharomyces pastorianus
atgaagttattgcatttatatgaagcgagcttgaagagaaggcccaaaactacgaatgcgataatgacaggtgcgctatttggaattggtgatgtttctgctcaattgttgtttccaacatccaaagtaaacaagggttatgattataaaaggacagctagggctgtcatctatggttctttaattttctcctttataggtgacaagtggtacaagatcttgaacaacaagatttatatgcgtaacagacctcagtaccactggtctaatatggttttacgggtagctgtcgatcaattggcgtttgcgccgctaggtttgccattttatttcacctgtatgtccatcatggaaggtagatcatttgacgtagctaagttgaaaataaaagagcaatggtggcctacacttttgactaattgggcagtttggccacttttccaagcgattaacttttctgttgttcctttacaacataggttactagctgttaatgtcgttgcaatattttggaacacttacttatcttataaaaactcaaaggttatggagaaagacaaggtacctgttcattatccacccgtggtcgaataa

SEQ ID NO: 191088 - DNA, 825 bp, Saccharomyces pastorianus
atggaggagagtaagacaaaaagaaaagaggatcgcatagatttgaagaatacaccgcctcagaagaagtcaaaaagagattcaacaaatgacgaaactgcacgcacatcactacgttcaatcatgcccaggggttataaaatgatggaaaacatgggttacaaagaaggagaaacattaggtagtaatgaaagtgccctaaaagagcctattaaggtagaaatcaatacaaaaaggaggggaattcgtgcagaaaagcccgacccatcaacaatgaatgacatgcagatgagtgaacaacgatttataaaaagagaaagtgaaatgaaaaataataagcggttaaaaaaaatttggtataggatccaaaaagttgcttttgaaatgatgggtgattccgatttatacaatccaggcgaagatccgagagactttaacgtactttggagatcttacgttatgcaactaaatgaggaagtagcaaaaaatgacctaaataatcacagtaacaatgataatgaagataagaataatatgataccaatggtaaatgaaagtttggaggcttcgcctgcaataaaaggtgaaaagtttggacgtccttctacattaatagattgtgatacttcaattatcggtagtcgcattacaaaagacacagaacttgctgaattagaagaattgagcattgaaaaaagaataacaaaattgaatatattcctgaggtccgagaagtactactgttttttttgcggaatcaagtataaggatgaaggtgatctctacgagcattgcccaggagtgaatgaagacgaccacaaatga

SEQ ID NO: 191089 - DNA, 4026 bp, Saccharomyces pastorianus
atgggccgtccaaggaagaatgttagccaggagaaaatacaacagttgaagagagaactggagctggccggtaacaggacagacgtcttgttgcaagacaaaaagggccgttccaggtcttgtcttctttgtagaagaagaaagcaacgatgcgaccataaattacccagttgtaccgcctgtttgaaagcaggaataaagtgcgtgcagccctccaagtactcttcttccacttcgaacagtaacaccaacaacaacacccctacagctggcactgtacctcctacacctcatcctgtaataaaacgtgagctgcaagatagcagtattggcgctggcgctggcgctgccacttctctgaatgacatgacgataataaaacccatttccactagcaatagtaatgttgatgctggcgacgcgaatgaattcaggaaaacgataaagtccgtcacgacaaattccaatccaaacctgatgaggcaagacaaagatcagtatacgattttcttggagaaaaaactaaaaagtttggagactttgctcgatttatcgccgggatgcaaccagtacaactacgaattatcccagtacaagaaggtttctcatttgttcagtaacaacacttctgattactctagaccgaacagcagcaatatggtcatactgccgctgccatctccttccaacaaacccctggagaacacaaacaataacggcagcaacgttaatgcggccactaacgatacatcggccagtacgaacaacataaacaacaataatgctatctgccaatccgcgagccttttgaatgaccctttagagacgctggacttcactaagtgtatttttgccaaatacaatttgaaaaaagagtttttgatgtatgaccctatttttgaactgaatgagaagctgtcacgttccttcttggacacttttttcacaagattacaattcaagtaccctatcttagacgaacaagaaatctatactttttatgaccactacctccacaacaagattcttatcccaccatcttctcccgccacgtcttccgcagcaccaccgtcgaattcacattcgtattctgaaatagaatttcattttctatccggcagaatgtggcttgtcttcagcatcagcgcctacttactgatgaccacaggtaagtacaaggggtttccacctcaccgatatttctccaccgctatccgtcacatcactaagtgtggtctacatttgaattatgttcagcaaatagaactgttgacattgcttgtcctttacattattaggactgatagagattctctgatactatatgacataatcaaggatgtcatgggcatatccaagaagaaacttcatctaaatcaatggtatcctaatgatccatttgcaaataagaaactgcgactattttggtgtgtttacctgttggaaagaatgatttgtgttgctgtggggaaaccttatacaatcaaggagtcggaaataaatttacctcttttcaataacgactctttttatacaaaaggtgtgcatgcggcggctccatcaaccaatgaccatggtgtgcaattcatcaatcagtctctaaagctgcgaagaattgaatctcaatttgtagagactttacagctattgaaaaacgattccaggtcagtgaagcaatccattgatcaattgcccctagtacgaaaattttttgaagatttggaagtttggagaaaaagttattccactcttgacgtgaaaaatttcgaaaacgagacactaaaactttattactatagatcagtgcgattgcttatacaaccatatttggaatttttcgccccggaggatagactatttagagaatgtcaagctgctgcgggtcaaatttgtcagttatacaagatattccatcaaaaaacgcttaatggtcattctacaccagcagtgcatacggtttttgtagctggcgtaactttaatctactgtatgtggttagccaggaattttgacgatcaaaggaggaagaaattaggcgatgcttcgaagcatactagacctttaatcagtgcaagtctcttttcgacgatggatgatttgagagcttgctccgtttgtttatatgttatgacagaaaggtctaattttgcaagaacctttagagatactttcgatcagttaatgaatgccacggtaggtaatttgattgaaagatgtggtccagactcttctgagttaattttcatggctagtagtgtcgccaagcgtactgaacccaagaacatcaatgatgaggccaataaggcaatttcatctggggatactcttcatgattctaactccgcaaatgcagctaatctatccaattcaaacgataaaaatatatctcataatggcggtatgccgcctgctgtggctagaatatttggtaaaggacaagctgaagagcacgccggttttgtggaaaattcacaagtggatttggctgaacaagagaaattcaagaagaagcaaggtgttttagaaaagacctctgtacccaaaagtttagctcacctattaaccaaaatggatgacaggtcacgtatttcaaattcttcaatgtcttatacaacatcttcttcgtcatcatcttcttcttcgtcatcatcgtcgacattatcgtttccttcttcccaagaaaaaaacctgaaaatcaatgtaaacaatgataacaatggtatgaccatcagcagcgtcaacagagaacacaacaataatcacaacaataataatgataataataataataataacaataataataataatagtaataataataataatgttaataataatgataatgaaagtaatagcagaagcactaccaacaacagctgcaataatggcaacaacagccagtatgttcgtaacaacaacgtaactatggaaaatgatgtagaaaggcctattcaagaccaatatatcgtcaagaaaccaaccaaccaaacagagtttgattggcaagtatttcaacagcaggcctttctacaacagcaactagctcagcacaatttacaagcgtatctatcgtccctgaacaccgatactatgaccaatagaagtccttcaaaatcttctagcatatctacagcctcttcgcattcggatccgattccaatagcgatgacgcaaagcccaactccatatcctcaaacttccaatatgctaccgcaacagcatgtatcacgaccactgccgcaacaacagcgggagcagccacaacaacatattacttctccacaaagattctcagaaagcaattttacgaatcaattaaacaatggtatgatcaacagtaatcctctacaatctgcaatattctctaaccatacaagtgaaaataagcaattaagagatgtcgaagaatcaaatttcagtacatcacccctaagagcagattatggcaataatattatctcctcgataccagcgtcatttactagcaattcaattccggtcagtgtcaaacaagctcgaaatggctcttcttcgggcgatatacttttcagcaacggtgctcatgacatgatcaacaatatttccacctggaccaataactccgttctagatgctttgaatagcaagtccatactacaaacaatatttccccagagtcaagagccttcatctctgtccatggacaaacagcagcaacaacatcaacaacaaaatatgtgttctgaaaacaatgtaaccgctaataattttcaacagacgcagaatgacccttcgtataacagaaatttgttcatgatgtccaatcaggaaggtgtacaatataatcttgacgaaacagagaagaatggacctaaaacacaggtggaagcaaacactagcgcaaatctgcatttcgacaatgttattcctacagtaactaacgcagacatcaggaaaaagcgttctaactgggataacatgatgacatctggtccggtagaagacttttggacgattaatgatgactacggctttttaacgtga

SEQ ID NO: 191090 - DNA, 622 bp, Saccharomyces pastorianus
atggtacgtaatgcctcattaggattttaaaatatgaaaaaaatggacgtttcagcgaggaatgaataacaagaaatagctaatttgaatatattactggtgtttcatatctatatataccgcagaaaaagaaataaaacgcaatatatctttaaactggctccaccctgagaatatgataggaaactttttaaatttgagttctgttacatcaaaaacgtaattgcttgacacagatttttcgagggcaacagcgtggacttaacataatgtcgagtttaataacaacattttttgacggagagttaaaaaggctttgagaaaatagcagagtgaagtttatttttagcatccttgctgatacgccaaataattcaaaaattcactatactaacatggtcattaatttttaatattaatattatttatttaggctaaagttcatggttctctagctcgtgctggtaaagtcaagtctcaaacaccaaaggttgaaaaaaccgaaaagccaaagaagcctaagggtcgtgcttacaaaagattattgtacaccagaagattcgttaacgttaccttggttaacggtaagagaagaatgaacccaggtccatccgtccaataa

SEQ ID NO: 191091 - DNA, 93 bp, Saccharomyces pastorianus
atgccattctcccctgacattgcgtatagcattaactacgctcttgggaaatacttctttcatcgtatatcccatttccttgagagtgcttag

SEQ ID NO: 191092 - DNA, 5703 bp, Saccharomyces pastorianus
atgagatttaccagaggattgaaagcctcttcatctttaagagcgaaagctattggaagactaactaaactttcgacgggtgcaccaaatgatcaaaacagtaatggtacaacattagatttgataactcatacattgcctattttttattccacaaatacgtcaaagatatatactataccacttacattgagtgaatgggaagtactaacttcgctttgtgttgcaatccctaccacgctcgatctggtagagacaatgcttaaagaaataattgcgccttattttctggaaactccaagacaaagaatttcagatgttctgtcctcgaaattcaagttggaacagatgagaaatccgattgaattgctaactttccagctgactaagtttatgattcaagcttgtgaacagtatcccgttctttatgaaaatataggcggcatcatttcaacttattttgagcgtgtattaaagatttttactattaaacaatctggtctactatcattagtgggctttattaatgcatttatccagtttcccaactctacagagcttactaaattcacctggaaaaagttagcgaaacttgtgcttcgtggatcatttctaaacgaagttgataagattttgaattcctcagcaacgtttaccaatgattcaatcgtccagtattacgatgctggaaatgagctatccagtgcctacttattggaattaatatctcgcttgcaagtttcgctaatatctcatctgttaaacacttcacatgtcggcgccaacttgagtgagttcttactaaatcaacaataccaattttacaaatttgatcaagaagtagccgatgaaaacgatgatacgaagtgtattgatgacttttttttcaacgtaagaagcaataaacagttttttacagacatgtgtaaaatttccctgcaattttgttctgagtcacatattctcgacctatctacagacaaccgtgcaagattttcttttgatactcgagcccactacctacaaacgctatgtttaattccgtttatagaagatacagaaagcgagctttttgaaagttttacaaacgttgtttctgaatctattgataaatttttcttatctgatgtcgttacaccatctttgataaaagcaattgtagcttctgcctcattactgaattttttcacggaaaaattgtcattaactctgattcgtatgtttcctttattggtagcgtctccacatatcacgactgaaacagttaatgatgttgcaaaaatattcaccacagggttataccctctaaatgaagatgcaattgtgagtacaatttattccatgaacaacttattagctgtttccgaggacggatcgcccgtcccggtgctccgtgagcgccaattaacaataacatctggaaaaaatattgagaaagactactttcccttgcgaaattcatctgccagtttggatggcactggtgctctgctcggaaatacaactgtgggccaactttcctcccatgatgtcaatagtggagctactatgacataccatgcctctttgatatctaattgtgtggctgcaacgactacaatcgcctcatactataacacccaaagcataacagctttgactatctctattcttacgcaaaaagttaattctatgtcaaaggaattagacggtgttattttgaattctttggcaagactggctccgaatacttcactgacagaattttcgcttttactaaagttcttcaaatcgagaactgttattgcaacaaaaattgatgatagcgcactattgaaaaatattattaaagcgaaatgtgtgatatcaaaagaattgttggccaggcatttttcaagtgacttatatttcatgtatcttcatgatctattggactcaatcattgccagtggggaagtagaacgattggaacatcacagacctcaaacggagatttcccgtgttgctgatcaaatcgctacctacttagagcccctcgccgctctactacctgttccaggcgatacgccattggacatcaataaggatgaagtcactacaaacaagtttaggaacgcctggtttaattttgtcatccatgggtaccacttgggcgggcctattgtcaaacgaaatttttctttcttattaactattgcctataattcaccaccgctggcttctgaatttcctgctaataacaaggagctttcattggaaatgaatacaattttgcgccgcggttcatctaacgaaaatatcaaacaacaaaaacagcagataaccgaatatttcaataccaatattgttcagtacagaacaacttcatcgtctaaaatcatgtttttagcggctgccgttcttctagaaacgataagatgcgaggcaggtgattgttcgaagactctactgtacttctcagacccctccattctttccggttcaattgagaagtgtattgcagttttgtcggtttccatgattagaaaatatgctaggttgattcaaaagggtaacgatgccatattcaactccaaaatgattgctcaacaacttaataacttgctactttgcctttctcatagggaaccaactttgcaggatgccgcttttcatgcctgtgaaatatttatcagatctattccatcatcgttatgtcatcatttgtctctctacaccttattagatatgttaacagccctatttgatagtatcttggactcagaggcgcataaatttgaaccacggtatgaatttaaattaaaacattctaagacaacaatattggttccaagctcatcgtcctggcgcgctacgacactatcaagattgcacaagtcagctaaagaatgggtaagaattctattgaatagaagcaaccaggatactaagattttgttgcaatcatacatatcagatctcggtgagtacagcaggctaaattctgttgaatttggtgtctcatttgccatggatatggctggtttgattttacctgcagataaggaattatcaaggcttacttattatggtccagagaaacctaacacgatttctggatttatatctttacattcttggaggtcaaaatatcttttcgataccgctattacatcatcaccagaggatatcaaaaggcaaataggtatttccactcaaaacataagaaaaaatttgaccttaggaaataagattataactaaagacgtaactgattttcttgatatggctaccgcgttgttaattcttggcaatggtgcaccagcgtcattgatatatgatattgtgcacatcccgttcgaagtcttcacctctgcatctttaaagattgctacaaacgtatggttaacaatcataactgagaagcccgaagttgcacatttgcttttagttgaagtatgctattgctggatgcgctccattgatgacaatattggtctctattctcgcgatcatgacttaaagggcgaagaataccaaaaaatggaatattccccttacgacaaagcaggtatcaacagagatgcaaaaaatgcatcccaagctatgcaaccacatcttcatgttattaaattttttgcttcccatttcgagggcacactatttcaaagtgactttttattgaaaattttcacgaaatgtgcgctttatggtatcaagaatctgtataaggcttcactacacccgttcgctagaatgattcgccacgaattattgttattcgcgactctcgtactaaacgcaagttataagcagggatccaagtatatgggccgtttgtcgcaagaaatcacaaacggtgccctaagttggtttaaaagaccagtagcgtggccattcggctcaaatgagctgaaaatcaaagcagatttatctgttactagggaccttttccttcagctcaacaaattaagctcgctaatgtcacgtcattgcgggaaagattacaagatcctgaactatttcttggcaagcgaaatccagcagattcaaacctggcttactccgactgagaagattgaaggagccgacagcaacgagcttacaagcgatatcgttgaagctacctttgctaaagatccaacattagcaataaatctcttacaacgatgttatagcaagaaagctgaggatgttttagtgggcttagttgcaaaacatgctttaatgtgtgtggggtccccaagtgctcttgacctgttcataaaaggaagccacctgagcagtaagaaagacctacacgcaaccttatactgggcgccagtgagcccgttaaaatctatcaaccttttccttcccgaatggcaaggtaattcttttatcttacaattcagcatatattcgttggaatcacaagatgtgaacttggcattcttctatgttcctcaaatcgtacaatgtttgagatacgataaaaccggatatgtcgaaagattgattttggatactgcgaaaattagtgtgttattttctcatcaaataatctggaatatgcttgcaaactgctacaaggatgatgaaggtatacaagaagatgaaatcaaaccaactctagatcgtattagggagcgtatggtttcaagtttcagccaatctcatcgcgatttttacgaacgtgaatttgaattcttcgacgaagtaactggcatatctggtaagttgaaaccatacataaaaaaaagtaaggctgaaaagaaacataagatcgatgaagaaatgagcaaaattgaggtgaaacctgatgtttatttaccttctaatcctgacggtgtagttattgatattgatcggaagagtggtaagccacttcaatctcacgcaaaggcgccttttatggcgacctttaaaataaagaaagacgtaaaagatcctttgacaggtaaaaacaaggaagttgaaaaatggcaagctgctatcttcaaagtcggtgatgactgtaggcaagatgttctagcgttacaattgatctcgctatttagaaccatttggtctagtattggcttggatgtctacgtttttccctacagagttactgcgacggcaccgggttgtggtgtcatcgatgtgctacccaattcggtatcccgtgatatgttaggacgtgaagctgttaatggattatatgaatatttcactagtaaatttggtaatgaatctactatcgaatttcaaaacgcacgaaacaactttgttaaatccttagcgggatatagcgtaatttcgtatttgttgcaattcaaggatagacataatggtaacattatgtacgatgatcaaggacattgtctacatatcgattttgggtttatttttgatattgtcccaggtggtatcaagtttgaagcagtaccattcaagctgacgaaagaaatggttaaagtgatgggaggttcgccccagaccccagcgtatctggactttgaagaactttgtatcaaggcatatctagccgcccgtccgcacgtggaggccataattgagtgtgtaaatcctatgttaggaagcggtctcccctgctttaagggtcacaagacaattaggaatctaagagcaagatttcaacctcaaaaaaccgatcacgaagctgcactatatatgaaggcgctaatccgtaaaagttatgaaagtatattcactaaaggttatgatgaattccaaaggctcacaaatggcattccgtactga

SEQ ID NO: 191093 - DNA, 701 bp, Saccharomyces pastorianus
atggtacgtagatgcaactatatctttccgtttctcattggcggtttttagcgatcgaaaatactaacataatctttttggggggtgagaatgtatatgtgtactggatatgtatattcttggctttattcaaatagttgaaattacgccaattacaaaagaaaaagcaaaaagaaaatgaaaacagcagttctattcagcctaatttatcggcagcaagaattcgtttgaaaagggaccttgattcgctggacctcccaccaacagtgactttgaatgtaataacatcaccagatagtgcggatagatcacaatcgccgaaattggaggtaattgttaggcctgatgaaggatattataattatggatctattaatttcaatttggattttaacgaagtttatccgattgaaccaccaaaagttgtatgtttgaagaagatctttcatccaaatatcgatttaaaggggaacgtttgcctaaatattcttcgagaagactggtcgccagctctagatttgcagagtattataaccgggcttcttttcttgttcttggagcctaatcccaatgacccgttaaacaaggatgcagcaaagttactgtgtgagggtgagaaagaatttgctgaagctgtgagattgaccatgtctggaggttcaattgaacatgtcaaatatgataacatagtttctccttga

SEQ ID NO: 191094 - DNA, 348 bp, Saccharomyces pastorianus
atgaaattaacaaaagaaaaaaaaaacgactgcttagtaggagtgtcatatatccctcctttaaatttttttacacttactttcctttttttattgagaatagaaaaggtgcatctctctctctctctctctctatctctatctctaaggttttattactttcataacgtatgctatccatctcttttcctttttttttgttttgttattccctttttttactcagttagattcatactactatatttacatattcttcgaagcttttatgagttaaatattttgttgctttatggggcagaaaatagtcgacgtcagtcacctccaggttattatgtaattcgctaa

SEQ ID NO: 191095 - DNA, 435 bp, Saccharomyces pastorianus
atgggtcaacaaagacgctcaccattggaaactgttttcctgccgttgccatcttcacagacaacgtcgacgcacgcgatagctcatttcgtacttcctgcatgtctattttatagtcgttcaatatttgatcattggggttgccgttccaaatcaacggccagtacttcacagaccaggcattgttcagttcctttgtgctgggcgcaaactcaggcacttcgatatcatcactcagttcatactttttcgttccaacccaaatactcttcaatttattgtttatttcaccttcgtcgcaaatatactctttcgaacacaacaccacttccaaggtggaggtctcgatgtccttgcggatccttttcaaatgtctcaatgaaacagggtcatttttctgaaaatcgtttcgaattagcctactttactagttag

SEQ ID NO: 191096 - DNA, 858 bp, Saccharomyces pastorianus
atgttttttgagtccaggccaattgttggagttgggggagggggtggagcttgtggagggttgctaacatgtgttggcagagacgctgaaggcaaagggggtgctgacacactaggaagagaaatattagagctttttctttggtggcttctgtgtgctggccttactgaaggcatatgcggtctattttgcggtacctttggagcagaggcacctgataatggaagcggtggtgctggagatgatggtacaatgggaataggaggggccgcagaagatggaatatcaggaattggaggtgcagaagacgagggaatactaggaacagcgggtgctggtgataatggtgcattaggaatggggggagccgcaacagatggcaccgcgcccggaattggcggtgcgctcgccgatggagagggtttagtgcttgcattgttattgatatgttttaacttcggtatacctccagctaaaatatcgcccaactgcggagcgcccatcccagggattggaggagctgacatagagggtcctttactactgacggtaccagaacttcctgaggccgatgaaacgacaccacctcccacgattggggcacttctatcattggtctcagctttctttagtttcattccctttctaatgtcacctaacagggcgtcacggccctgcatcacagattttgccggtttaggagcactaccacctaatgctggtggaggcggtggaggaggaggagctggagcacctgccatttcaacaattcgttatatatatggtaggcttcttcaacaaacggttgtgcgctttttagtcgtatgctttgtctcatatcaaaaactttcttcataa

SEQ ID NO: 191097 - DNA, 831 bp, Saccharomyces pastorianus
atggctaaacaatcattaggtatgtgcacaaatgctaaatcactgaaaccctgtagagctggaattgaaaatatagtttgtaccttttgcctgagggcagaatgactcaatgttatcttaattcgattagaaaaagaaggtgcgttatccaaggttgaaacttgtaaactatttaggtgatgtctcataactgcaaccactggaaaatgacgcaaatatcaaaataatagggagataaagtctcacgacatgaaaaaatcatagaattattgttcaatttatctagccgtatcttaccttatggaaaaagtgtgaatatgtttttctaaatcgagcttcccggaaattacactatattatgcatccgtgatacatctgaaattcaatactttctccaaggtcctgcttactaagagggtaagatttgttgaaactcgaaatactaacattattttcattattttagacgtttcctccgacagaagaaaggctagaaaggcttatttcaccgccccatcctcccaacgtcgtgttttgctatctgctccattatctaaggagttgagagctcaatacggtatcaaggccttgccaatcagaagagatgatgaagttttggttgttcgtggttccaagaagggtcaagaaggtaagatttcatctgtttacagattgaaatttgccgttcaagttgacaaggttaccaaggaaaaggtcaacggtgcttccgttccaattaacttgcacccatccaagcttgtcattactaaattacatttggacaaggacagaaaagctttgatccaaagaaagggcggtaagttggaataa

SEQ ID NO: 191098 - DNA, 1530 bp, Saccharomyces pastorianus
atgccaaatgtgctttctgatgatgaagagctccttaatggactaggaagtgagattatgaaaccctctagacaaggtaaccatatggcaaggaccgtcaaaaggtgggtaaataaagaacgtgctaccacagccgatctgaaaaatgttaatattgatggagttcatggaccggtaaataccgaaagttatatatcaccaggacagctttactccactgactcgggcaatttatttcatgctggaagaatccttgtcgttctagtcggtcttccagcaacatcaaagacactattgtcagtagcgattacaagatatacaagatggttaggagttaggacgaaatcgttccatttttcagaatataaagaatcagctaaaaatataccctcagactatttttgcgtagtgccaacgtcaaaagaaggtgtagcgtttgttgaaaagcttcgcatgcagatgttgaatgatatactggcatttttcaacgacttgtcaggtcagctggccatttatgatgccctaaacatccgtaaaattgacagaaagaatttggagacaacgttttctgaaattggagttaaagtactcttcatagaatcaatcgtgtctgatcaagaaatcatgaatagaaacatagctcttgcactggagtcgaacgattacaagggactttcaactgatgaagccattgacgaatatatgagacgtttatcagtgaacgaaccatactatgaaatgatgacacatgacgaagaattatcgtacattaaatatataaatttgggaaagcagataattgtgaaagataacatacatggttatttggtcaacaaaatagtatttttcttaatgaatttgaggcagaaaaaggggtgtgtatattttgctcgctgtggcaccagcgataaagacaactacatacatgatgaggaactaaacgaggagggaatccattactctcaagttctcaaggattttgtcctccaacgaattaaacagaagagacaggccaaaaaaaattcggattccttagtcgaagtaatagatggaagtcatgatgaagatttgaagacttccttgatagtttggacaggtcccaggaaaagaacccacgatactgcactctttttttcaaaagaaggtattaaagttcagcaacggtcagagttgagacagttgaacccaggaagtattgctgatcttactgatcaacagataatggacaaatttccatcagaatataaagaatcattaaaagacccatatcattttcgattccctagggcggaatcttaccatgacttagccgttcgtatggaacctttactattagaaatggagcatacgagcaaggacattctcatcattgcacatgagtcaacattaagagtattatatggctatttaatggcttgcacctgcgtagagttaccaaatctaaatttcacaagagacaaattagttgaaatttcattcagccctttctgtaatactgtagagttactgaacattcctttaactagctaa

SEQ ID NO: 191099 - DNA, 1008 bp, Saccharomyces pastorianus
atgtctgaaccagctcaaaagaaacaaaaggttgctaacaactctctagaacaattgaaagcctccggcactgtcgttgttgccgacactggtgatttcggctctattgccaagtttcaacctcaagactccacaactaacccatcattgatcttggctgctgccaagcaaccaacttacgccaagttgatcgatgttgccgtggaatacggtaagaagcatggtaagaccaccgaagaacaagtcgaaaatgctgtggacagattgttagtcgaattcggtaaggagatcttaaagattgttccaggcagagtctccaccgaagttgatgctagattgtcttttgacactcaagctaccattgaaaaggctagacatatcattaaattgtttgaacaagaaggtgtctccaaggaaagagtccttattaaaattgcttccacttgggaaggtattcaagctgccaaagaattggaagaaaaggacggtatccactgtaatttgactctattattctccttcgttcaagcagttgcctgtgccgaggcccaagttactttgatttccccatttgttggtagaattctagactggtacaaatccagcactggtaaagattacaagggtgaagccgacccaggtgttatttccgtcaagaaaatctacaactactacaagaagtacggttacaagactattgttatgggtgcttctttcagaagcactgacgaaatcaaaaacttggctggtgttgactatctaacaatttctccagctttattggacaagttgatgaacagtactgaacctttcccaagagttttggaccctgtctccgctaagaaggaagccggcgacaagatttcttacatcagcgacgaatctaaattcagattcgacttgaatgaagacgctatggccactgaaaaattgtccgaaggtatcagaaaattctctgccgatattgttactctattcgacttgattgaaaagaaagttaccgcttaa

SEQ ID NO: 191100 - DNA, 330 bp, Saccharomyces pastorianus
atgtctgcctttgttactaaagctgaagagatgatcaaatctcatccatatttccagttatccgccagctggtgccccgactgcgtctatgctaattccatttggaataagttgaatgtacaggacaaagttttcgtttttgatattggttcacttccaagaaacgaacaggaaaaatggagaattgcgttccaaaaagttgttggtagcagaaacttaccaacgatagttgtcaatggtaaattctggggtactgagagtcaattgcatagatttgaagcaaaaggcactcttgaggaggaattgactaaaatcgggcttctgccttga

SEQ ID NO: 191101 - DNA, 1227 bp, Saccharomyces pastorianus
atgtcctttgatagacagttgaccgaagaccaggaggtcgtccttaagcaaatttggacacaccttttccatctgtggcaagttcccgtggatggaactcatattttccctaataactccctccactcctcgtccacccctgctaagaagaagaaatcatcctggtttagcaagcttcagtcctcagaccatacacaggactccagcgaagccgctgaagcggcacacctctatgaaaagggcaagatacacaaggcactagccaatctagacccgcaaacgaccaagaagcagttctggcacgatatcaagaatgaaactccagacgccaccattttgaagtttatcagagccagaaagtggaacgcagacaagaccatcgccatgttgggtcacgatttgtactggcgcaaggacactattaacaagatcataaacggtggcgaaagagctgtgtatgagaataacgagaccggtgtcattaagaacctggaattgcaaaaggccaccatccagggttacgacaatgacatgaggccagtcatccttgtgagacctagattacatcattcttccgaccaaactgaacaggagctggaaaaattctccctgttggtcatcgagcaatcaaagcttttcttcaaagaaaactaccccgcatccaccaccatcttgttcgatctgaacgggttctccatgtccaatatggactatgcccccgtcaagtttctaatcacttgttttgaggctcactacccggaatctttgggccatctacttatccataaggccccttggatctttaacccgatttggaacatcatcaagaattggctggatccggtcgtcgcgtccaagattgttttcactaagaatatcgacgaattgcacaagtttatccaaccccaatacatccctaggtatctgggcggagaaaatgacaatgatttggatcattacactccaccagatggctctttggacgtccatctgaaagacaccgagactcgcgctatgatcgaaaaggagagagaagaattggtcgaacaattcttgactgtcactgcccaatggattgaacaccagccattgaacgatccagcatacattcaactgcaggagaaaagagtacaactttccaccgctctttgtgaaaactactccaagttagatccgtacatcagatcaagatccgtttatgactacaatggttctctaaaagtttga

SEQ ID NO: 191102 - DNA, 1830 bp, Saccharomyces pastorianus
atggagcaaaacgctgaaaaacgctctattgttggcgacgacaactcaaccgtgaagagacaagacacttccccgtccaaaggtattgcacatatcaaaccagaatatattgtaccattgaagcagaatgaaaaccagaaggtcgccatctatgatgaagagatgtcttccgacagaatgacaaacgagtttgcaggtgggactaataagaaaaataagaacggaagaggtaagaagcgtgggcaaaacaagaatagagataacaggcaggtcaaggaacagaatgtcttgtgcccacgcttgatccatggcgatatatctaaatgctcctttggtgataactgtaggtttgttcacgatatcaatctgtacctttcaacaaaaaagcctgaagttgaaagtaatatatttccttcctgtccggtcttcaactcgttgggattttgccccatgggattcaaatgcagatttttatcgtctcatctgaataaagaagataatatcctaatatcgaagaaggagattgatccagatgcgcaaacaatatggtccgttaaaggtgaggtaaaccatatctcaccggaaagaaaactcgatcttataaaaagaagatttcctttcacaaaaagtaatgaaatattggaaatcatcgactctttccaacaagaatgtagagattccatgaagccagaagaagaagttgagtcaacgccacagctgaagaaacaagacccagatgtggaacaaccagttgccccccaagtcgaacagaggaacaaagaattgtcagaacatagaatgaaacagcgtgaagtatacttgaagtacaaggacactcgttattttgctcaagaaaaaaagccactggatttgtaccacaaaaaaatcgtgtcgccattgacaaccgtaggcaatttaccataccgtcgtctaatgagaaagttaggtgcagatgtgacatattcggaaatggccttggcagttcccttaattcaaggaactaattctgagtgggcgttacctaaagctcacacatcagagttccccgggttcggggttcaagtggcctgttctaaagcctggcaggcggcaaaggctgcagaagcactcgcaaactccgtcagtgaaataagtgaaatcaacttaaactctggctgccccatcgatttgctatacagacaaggttctggtagcgccctgctggataaccctgcaagaatgattcgttgtttaaacgcgatgaactacgtatcgaaagatattcctatcacggtgaagatcagaacaggtacaaaggaaggtcatcctatcgcggaagggttagtcaaaagactggttaacgaaactgatgtggctgcgattaccttacacggtaggtctaggcaacaaaggtacactaagtctgcggattgggactacgtgagtcaagtggctgacaccttgagatccgccgaagcggatttcatcgaaaccgaacaaggcaaagaaggcagggattccaagaacagaattcaatttgtcggaaatggtgatgtcaacaattttgaagactggtaccgctatttgaacggaaatgaaaatattgatagtgttatggttgctcgaggggccctgatcaaaccatggatttttgaagaggttgagtcgcagcagtatctagacaagacaagtacggaaagattagacattttaagggattatgcgcagttctctatggaacactggggcaccgacgaatacggcatttctcaatgtcgtagattcttctgcgagttcatgtccttttttcataggtatgtcccatgggtatttgtgaaagataccctgtga

SEQ ID NO: 191103 - DNA, 516 bp, Saccharomyces pastorianus
atgaaacttttcaaaaatggtgcacgggctttctgtatattgaactttccgtcgcttttcggagctacaattcccctacccggcttgtcggcattaagtctcttcatcccgtgtactattacccgacagtttctgcggcatgttctgtggaacgacggtacgggcggtgactgggtgccaaacagtgcggcgttcccgtgcgcaaggtggtctgcggtaggaaaaagaaacaaaacgcgcctacgtcgtgcaaggggacaggattttgtcagttacataataaggagcaatttcgaatcaattgaaatttggaacaaatgggcgatgcattcgttaaaaggcgattttgtatcaaataacgtcactatcagccattgtcacttgccactgtcgcctgccaccgctattgccattatcatttgctttcgcatcgtcaccgatttaaagctctctaggctaacgtacgcattttacctcccaggccctatctcttttctacctgtcatccctatataa

SEQ ID NO: 191104 - DNA, 5314 bp, Saccharomyces pastorianus
atggaatcccaacaattacatcaaaatccacattctcttcatggtagcgcctatgcttcggttacttctaaggaagtcccatcaaatcaagatccgttagccgtttcagcttccaatttaccggaatttgatagagattccactaaggttaattctcaacaagagacaacacctgggacatcagctgttccagagaaccatcatcatgtctctcctcaacctgcttcagtaccacctccacagaatggacagtaccaacagcacggcatgatgaccccaaacaaagctatggcctctaactgggcacattaccaacaaccatctatgatgacgtgttcacattatcaaacgtcacctgcgtattatcaaccggacccacactatccgttgccacagtatatcccaccactgagtacttcctcacctgatccaatcgatttaaaaaatcaacactctgaaatacctcaagctaagacaaaggtgggaaataacgtcttaccaccacacactttaacatcagaagaaaacttttctacatgggttaaattttacatcagatttttgaagaactctaatctcggtgacatcattccaaatgaccagggtgaaatcaaaagacaaatgacttatgaagaacatgcgtatatatacaataccttccaagcatttgccccatttcatttattgccaacatgggtaaaacaaattttagaaattaattatgctgacatccttacagtcctttgtaaaagtgtgtccaaaatgcaaactaacaatcaagaattaaaggattggatagctcttgccaaccttgagtacgacggaagtacatctgctgatacatttgaaattacagtcagtacgatcattcagaggctaaaagaaaacaatatcaatgttagcgacagattggcctgtcaactaatacttaaaggtctatccggtgacttcaaatacctacgtaatcaatatcgtaccaaaacgaacatgaaactttcccaattattcgctgaaattcaattaatatatgacgaaaataaaatcatgaatctaaataaaccgtcccaatacaaacaacacagcgaatacaaaaatgtttctcgcacatctccaaacacgactaacacaaaggttacaactcgtaattatcatagaacaaatagttcaaaaccaagagcagcaaaagctcacaatattgctacatctagtaaattctcaagggtgaacaatgatcacattaatgaatcaaccgtttcatcacaatacttaagcgatgacaacgaacttagtcttaggccagcaacagaaagaatctaagccaacacacacaatagactcgaatgacgaactacctgatcaccttcttattgattcaggagcttcgcaaacgcttgtcagatcagcccattatttacaccatgcaacacccaattctgaaataaacatagtcgatgctcaaaaacaagacattcctataaatgccattggtaatcttcacttcaactttcagaacggcaccaaaacatcaataaaagcactacacacaccaaacatagcctatgatctattaagtttgagtgagctggctaaccaaaatattactgcctgctttaccagaaacactttagaaagatcggatggtacagtactagctcccatagtcaaacatggagacttttactggttatctaaaaaatacctaattccttcgcacatttcaaagctaacaataaacaacgtcaacaaaagcaaaagcgtaaataaatatccatatccgttaatacatcgaatgcttggacatgctaacttccgaagtattcagaagtctcttaagaagaatgcagttacatatttgaaggaatcggatattgaatggtctaacgctagcacatatcaatgtcctgactgtctaatcggcaaaagcacgaaacatagacatgtcaaaggatcacgactaaagtaccaagaatcatatgagccttttcagtacttgcataccgatatatttggtcctgtacatcacttaccgaaaagtgcaccttcttactttatatcgtttacagatgagaaaaccagattccaatgggtgtacccattacacgaccgtcgtgaagaatctatcctcaatgtttttacatcgatattagcatttattaagaaccaattcaatgctcgcgttctagttatccagatggatcgtggctccgagtacactaacaaaactcttcataagttctttacgaacagaggtattactgcatgctatacaaccacggcagattctagagcacacggtgtcgctgaacgattaaatcgtactttattaaacgattgtcgcacactgcttcattgcagtggtctaccaaatcatctatggttctcagcagtcgaattttctactataatcagaaattcattagtctcaccaaaaaacgataaatctgcaagacaacatgcaggtttagctggactggacattactactatactacctttcggtcaaccggttatagttaacaaccataatcccgactcgaaaatacatcctcgtggcattccaggttacgccttacatccgtcacgaaactcttatggctatattatctatcttccatcattaaaaaagacagtagatactaccaattacgttatattacaagacaaccaatccaaattggaccaattcaattatgatacactcacctttgatgatgatctcaatcgtttaacagcccataaccaatcttttattgaacaaaatgaaacagagcagtcatatgatcaaaatacagaatctgatcatgactatcaatcggagattgaaataaactctgatcctctagtgaacgacttctcgtcccaatcaatgaaccccttacaattagaccacgaaccagtccaaaaagtacgtgcaccaaaagaagttgatgccgacatatctgaatacaatattcttccatctcctgtacgatctcgtacaccccatatcattaataaagagagtaccgaaatgggtggtaccattgaatcagatactacttcacctagacactcgtctaccttcactgcacgaaaccaaaagcgacctggtagtcccaatgatatgattgatttgacctcacaggatagagttaattatggacttgaaaacatcaaaactacacgtttgggtggtacggaggaaccatatattcaacgaaatagtgatacaaatatcaaatacaggactacaaatagtacgccctcaatagatgaccgttcgtccaacagtgaatccactactcccatcatctccatagaaacaaaggctgtatgtgataatacaccctccattgatacggatccgccagaatatcgatcttctgaccatgcgactcctaatataatgcctgacaaatcctcaaaaaatgttacggctgattctattcttgacgacctcccacttcctgacttaacccataaatctcctacggacacttctgatgtttcaaaagatattccacacatacactctcgtcagactaattccagtttgggtggtatggatgattctaatgttctgactactaccaaaagtaagaaaagatcattagaagataatgaaactgaaattgaggtatcccgagacacatggaataataagaatatgagaagtctggaaccaccaagatcgaagaaacgcataaatttaattgcagcaataaaaggagtgaaatcgatcaaaccagttcgaacgaccttaagatatgatgaagcaattacatataataaagacaacaaagaaaaagacagatatgttgaagcttatcataaagaaattagccaactattgaaaatgaacacttgggatacaaacaaatattatgatagaaatgacatagatcctaaaaaagtaataaactcaatgtttatatttaacaagaaacgtgatggtacacacaaagctagatttgttgcaagaggcgacattcaacaccccgatacatatgattctgatatgcaatccaataccgtacatcactatgcactgatgacgtcactgtcaatcgcattagacaacgactattatatcacacagctggacatatcctctgcttacttatatgctgatatcaaagaagaattatacataagacctccaccacatttaggtttgaatgataaattactacgtttgagaaaatcactctatggtttgaaacaaagtggtgcaaactggtatgaaaccattaaatcatatttaataaattgttgcgacatgcaagaagttcgcggatggtcatgcgtatttaagaatagtcaagtaacaatttgcttattcgttgatgatatgatattattcagcaaagacttaaatgcaaataagaaaatcataacaacactcaagaaacaatacgatacaaagataataaatctgggtgaaagagataacgaaattcagtacgacatacttggattagagatcaaatatcaaagaagcaagtacatgaaattaggtatggaaaaatccttgacagaaaaattacccaaactaaacgtacctttgaacccaaaaggaaagaaacttagagctccaggtcaaccaggtcattatatagaccaggatgaactagaaatagatgaagatgaatacaaagagaaggtacatgaaatgcaaaagttgattggtctagcttcatatgttggatataaatttagatttgacttactatactacatcaacacacttgctcaacatatactattcccctctagacaagttttagacatgacatatgagttaatacaattcatgtgggacactagagataaacaattaatatggcacaaaaacaaacctaccaagccagataataaactagtcgcaataagcgatgcttcatatggtaaccaaccatattacaagtcacaaattggtaacattttcctactcaacggaaaagtgattggaggaaagtcgacaaaggcttcgttaacatgcacttcaactacagaagcagaaatacacgcagtcagtgaagctataccgctattgaataacctcagtcaccttgtgcaagaacttaacaagaaaccaattattaaaggcttacttactgatagtagatcaacgatcagtataattaagtctacaaatgaagagaaatttagaaacagattttttggcacaaaggcaatgagacttagagatgaagtatcaggtaataatttatacgtatactacatcgagaccaagaagaacattgctgatgtgatgacaaaacctcttccgataaaaacatttaaactattaacaaacaaatggattcattag

SEQ ID NO: 191105 - DNA, 726 bp, Saccharomyces pastorianus
atgaatatgggaggcagtagcagcactgctgccaaaaaagcgacttgtaaaatatcgatgttatggaattggtataccattgacacctgcttcattgccagatcttggagaaatgacaccaaaggaaaatttgctggttcttgcatcggctgttttgcgcttgtggtggtagctcaatggcttactcgtttttcaaggcaatttgacgtagagctattaaaaagacagaaaataaagcatttagctagttactcgccagaggagtacgttgtcaaatgtggagaagaggatgctaaatctgatatagaagaactacaaggcttttacaacgaaccaagctggaaaacaactttaatttccttacaaaaaagtttcatttatagtttttacgtttggggtccaaggagattgaacgagccagaagacgacctgttaaagaaggtcctatcatgctgtacattaataacgccagtggatttgtacccaacttttttggatcacatgataagagttactattttcgtattacagtgggggttatcttatatcatcatgctgctgttcatgtactataacggctatatcattattagttgtttaataggtgctatcgttggtcgtttcatattttgctatgaacctctaggctcattgggtgctaatggatcagcccagggtacagtgagttatgataaagagagtgatgatcgcaaatgctgcttgtag

SEQ ID NO: 191106 - DNA, 207 bp, Saccharomyces pastorianus
atgcatttgtgccagaatggacactattacaaaccccaccgtgcctcagctgagaaggtcccttacctaaagaaaaagaaaaagaattctcgaaacgaaggcaaggcaaaaaaaaagaatgaaaagaaaaaaataggaactgttgaattttttcaacaaaaaaaaaaagaaaaaaaacgggtcctaaatgcggtgtgtgggttataa

SEQ ID NO: 191107 - DNA, 825 bp, Saccharomyces pastorianus
atggattttaaagcaagtgggacaaagtttaagaaaactggcaagaaggtagtgcctgctaaagcgtttgaagaaattgttcagacaaatagagatgttctgaaaaaatcagcattcctctcagatttacttgaaaatttacaaccgcacctcaataacattaagaaaatacgatgtgttgcaattggaaatttcaaggaggattttcctgcgacgtaccaattcgctcttctcctagagattactgattatataaaaagtgaggatgaaagggatgtcgttgtttccctgtatgatccaatatttactaaagaagagatacagtacttgaaaagtttaggaagcaaatggctgatagaggaagaattttcagagaacgatgcaattgattatgaatcggtattatatttccttccccatgctcctttggatttaactgagaacatactatcgtcacagcgaccacacttatggctggcaaataatatgatatcacacaccgatagatacaccaaagcaaaactttgtgaaaactatcctaatttaagcaagctagttcattacttgcagactaacgctccgccagaagttaaaaaagcacatgatgtagatggttttgcaacattcattccaaagagaaaaagaaaaaacagaaacaactcctctaaactcaaggtcacaccatctgatatagactatgattcaatagcaccgaagtttaagtcctgccaaatactcaccgattttgatgaaggaaagtatttgaaggaaaaaccctggatcaattccttctctgacttgacgttacatgctatagagtactaa

SEQ ID NO: 191108 - DNA, 2028 bp, Saccharomyces pastorianus
atgaattttaaaatactcctcccgatttgtgctttattgacacttacaacatttctgttgaccattattgcaactgcgggttctacctcaaattataagccaataacgaacatttatatcggtgatgctgatatatcaaaaatcaacgttacaaaagttatgccacaagttggcccaattttgactgtgttaggttctgctctaaccgctccaaatacaacggtggataccatcttcggcgctcttaaggcaatcgcttctaccgaagccttgtctcctttactgcacttgttgtctaatgctgctaacacttcagccacattatcatctttgacacagttggctccaatggctttgctaggaaccaataccgctactaccacgaccttctccgctcttgatgagttattgactacctctaaaaacacaaccgaactcttggatgggtttagcacattgatgtcatctatgtcaaccaacacttcttctacttcggcttccttagaaaatactgttctaaccctattagtggattcgaccaatcctataggcactactgagtctttgatcactttaaataatatgaccacagaagaaaagacaaaattgtcgcctgtattcgagttattcgcaagttccaagaacattactgccacatgcgatgcgttagaaaccataatgaactctaccattccaacttcaacggtctcctcattgttttctagtctaaaaaccagtcttgcggaaggtggcaatgctactgaaactattatgcaattaggctccctcgttccttcgagtttaaaaccagctgtccaagctgttgttactctgtttgatgaaactacatctcaaaatgtaacattatccgtattgagcactatgattgccgaaaacattacccaatcatcttccgctaaagctgccatgggtgctttgactgacttgttgaattacactacaaaccaaacagagctgctaacatctgtcgaaagtttggccctctctaaagaagccgcttcctctactaaccaattggtggcacttgatgaaatcctttctgcaagtgctaacgcatccacagttgtttccataatccctactttggaatcccaattggccaataacaccgtattacttaagtacgttccatacttgttcagcctattagctgcgtcaagcgaccccgtgtcaagtttctcttctctggttaatatcaccaaatgggcagaaactaatgccgctacatttatgcccatgttgaaaattttaaactctgctgtaaacatgacaactatcacaccagaacaactcaaggaaatgactccttctatccttgaatatctacacatccctgtcatataccgtttgtccattttcacaatgtgtcgtgctcacttaaacagaacaatgtactcgtgtagcaagtcacacgctgttcaaaacatggatttccggtcgattgtttacaacaacattgaaggctcggactttaaaccttatatggatgccctgaacatcggtaaggacgatttgcatttagatggtgaattacaagacagacaacacatgtatgtcccagcagtgaaagcagctttagctatgaacttaatgtgcataatcacatccttcttcttaatggtattcttgttgctactaagtagacgttccgtggtgagtcaaaaattatggttggcattgggctttatttcctgttggatatgtattttcagcgggttgggaagcacaatctttagcgtcatccttaatatgatgaaatccggctccaagaaggacaattacgatgtcattatttctggctcttctccattttatggcctaatgtggtctggatttgtatttgccgtccttgtatttctctgcattgcatactgctggtggagcagcagaaagggagctgccatcgtggaagctgagaaagctgttcaagaaagtgactctactacctcaagaatcattgaagaacacgaaagccccattgatgctgaaaaaaactttgcaaggtaa

SEQ ID NO: 191109 - DNA, 915 bp, Saccharomyces pastorianus
atgactgcccaacaagtatgtgtaaagatgagtaaattgaaggatgtgatggttatggagatggcacacgtgcctagaggaaaatagttacccaagaacaaaagcaggaagggagctaaccttttaaatatgaactggacaaaactggacaaaatgaaaataacgattttagtaaaaatgaaaatatagcatcaaatgactgagaaacatagtaacaataactcatattatagctaatctgagtaaacttcttcctacgctaagaatttttttgaggatagtaccaaaccttgtgctgaatcagcacacgccatgcccaccatcaattgtgcaagaaaaaagtaaacgagtagtatactaactatatatgtgatttacatcacgatatgtcaattataggccccaaagtggtatccttccgaagacgttgctgccccaaagaaaaccagaaaggctgttcgcccacaaaagttgcgtgcctctctagttccaggcactgttttgatcttgctagctggccgtttcagaggtaagagagttgtctacttgaaacatctagaagacaacactctattggtcactggtccattcaaggtcaatggtgttccattgagaagagtcaacgctcgttatgtcattgctacctctaccaaagtctccgtggaaggtgtcaacgttgaaaaattcaacgttgaatactttgccaaggaaaaattgaccaagaaggaaaagaaggaagctaacttgttcccagaacaacaaactaaggaaatcaagactgaacgtgttgaagatcaaaaggttgttgacaaggctttgttggctgaaatcaagaagaccccattgttgaagcaatatttgtccgcttctttctctttgaagaacggtgacaagccacacctattgaaattctaa

SEQ ID NO: 191110 - DNA, 1131 bp, Saccharomyces pastorianus
atgcaagttgcaattccagaaaccatgaaggctgtcgtcattgaagacggtaaagcggttgttaaagagggcattcccattcctgaattggaagaaggattcgtattgattaagacactcgctgttgctggtaaccccactgattgggcacacattgactacaagatcgggcctcaaggatctattctgggatgtgatgctgctggccaaattgtcaaattgggcccagctgtcaatcctaaagacttttctatcggtgattatatttatgggttcattcacggatcttccgtaaggtttccttccaatggtgcttttgctgaatattctgctatttcaactgtggttgcctacaaatcacccaatgaactcaaatttttgggtgaggatgttctacctgccggccctgtcaggtctttggaaggtgtagccactatcccagtgtcactgaccacagccggcttggtgttgacctataacttgggcttggacctgaagtgggagccatcaaccccacaaagaaaaggccccatcttattatggggcggtgcaactgcagtaggtcagtcgctcatccaattagccaataaattgaatggcttcaccaagatcattgttgtggcttctcggaagcacgaaaaacttttgaaagaatatggtgctgatgaattatttgattatcatgatattgacgtggtagaacaaattaaacacaagtacaacaatatctcgtatttagtcgactgtgtcgcgaatcaagatacgcttcaacaagtgtacaaatgtgcggccgataaacaggatgctacaattgttgaattaaaaaatttgacagaagaaaacgtcaaaaaagagaacaggagacaaaacgttactattgacataataaggctatattcaataggtggccatgaagtaccatttggaaacattactttaccagccgactcagaagctaggaaagctgcaataaaatttatcaaattcatcaatccaaagattaatgatggacaaattcgccatattccagtaagggtctataagaacgggctttgtgatgttcctcatatcctaaaagacatcaaatatggtaagaactctggtgaaaaactcgttgccgtattaaactag

SEQ ID NO: 191111 - DNA, 363 bp, Saccharomyces pastorianus
atggtcaaattaacttcaatcgccgctggtgtcgctgccatcgctgctactgcttccgcaaccaccactatagctcaatctgacgaaagagtcaacttggttgaattgggtgtctacgtctctgatatcagagctcacttggcccaatactacatgttccaagccgcccacccaactgaaacctacccagttgaagttgctgaagccgttttcaactacggtgacttcaccaccatgttgactggtattgccccagaccaagtgaccagaatgatcaccggtgttccatggtactccagcagattaaagccagctatctccaaggctctatccaaagatggtatctacactatcgcaaactag

SEQ ID NO: 191112 - DNA, 552 bp, Saccharomyces pastorianus
atgggttcttcattcgtaatagatcgatcctcttcgtcaccagcgccaccacggggacccgccccgaaattgagtgcacatgctcgcaagataatatgcaaaatatcacccaatcggtcctttttgttcatcatatcgttacatatctgtgaaaagtactttatctcaatgggtttacgtgggcatagatcacgcttcagccgctctgtgtcgactttcttttcgccaggtaaacttgcttgcatagctcatctacgtgtaggctgccaaattgtacccatatttccttatggtgcttttctgaagactccttacaataggtgcgccggaaacaaagtcagtgaaagtacgcatcgtagagctgtcgttcggcctagcactcgctatttcgtgacaacgttccaggacacggaaactcaactcattatagtatcctctgttgaggtaaaaaagagaaagggtatcgtaatcctttctattgaatttcaaagtatgcacttgaaacaacgtgtagaccatcaagttgattttcttgggaacaagatactttga

SEQ ID NO: 191113 - DNA, 309 bp, Saccharomyces pastorianus
atggatcatccacataagtggcaccgtaagctcgtcaattgcaacagcgactttatttttaagagccgcggtcattttgttagtatctcttctcaacttgggcagcacaatttcacgatatttaacaggtatcatttgaaaaaaagaatcgttttccagatactcgtcaattcctcgcttcggttctctgaacaaaacttctcgattacgcaaaatgaggctggcatatggaagcagttgttcaactctccccaaagttttccacatactgatataccatcagaagaaggtaccaaagttattctataa

SEQ ID NO: 191114 - DNA, 873 bp, Saccharomyces pastorianus
atgtcagtttaccatttaccaacgctgttgaacccgctggttaatgctatatttaactgtcccgaaccagaaagatccccattgaaaaagcttttcgctaatttaaaaacccgtaggtttatcctcctagcacctccttcagaataccttttgaattaccacgatgtcaagagcaaactgccgttacatgacctctgttataatgcagagtttattaactcttacatattgttaatgactgaaaactcttacataaatacgaattcaagggacagtcattatgaaacgttagatggtaagaccgttgttattcaatggaagaataatgtgatccatgccttaaatggatttcatataaggcgaagactaaagattctagagacaaaaatattacccaattttaatgactactttgaaggggcggctgattttatcatactattcatagatcaacctttaaattgcgaatttgtacctaacgactacttacagtgttttcacaattatgagaaaataccaaaaaatgcacatgctatgccaaatctgtcgatagattcttttcagcaagaaagatcgtcattcgagaatatattgcacattcatcctgctcgattaacacagcttggccaattgttttcgagttacagaacgctcgctcctggtgatgatccatctagaagtatttttgaaagcatcgtgcaacaagcatttgatggaatgaaatcggattcacttttcaagaacttttctaatctttacgatcttatacacgactattttgaactaaatctttacgatgatatatggtctaggcttactacacatttcaaaggccacgaagtagacactgaaaaaataaatatttttcagtga

SEQ ID NO: 191115 - DNA, 5269 bp, Saccharomyces pastorianus
atggaatcccaacaattatctcaacattcacatatttctcatggtagcgcctgtgcttcggttacttctaaggaagtccacacaaatcaagatccgttagacgtttcagcttccaaaacagaagaatgtgagaaggcttccactaaggctaactctcaacagacaacaacacctgcttcatcagctgttccagagaacccccatcatgcctctcctcaacctgcttcagtaccacctccacagaatgggccgtacccacagcagtgcatgatgacccaaaaccaagccaatccatctggttggtcattttacggacacccatctatgattccgtatacaccttatcaaatgtcgcctatgtactttccacctgggccacaatcacagtttccgcagtatccatcatcagttggaacgcctctgagcactccatcacctgagtcaggtaatacatttactgattcatcctcagcggactctgatatgacatccactaaaaaatatgtcagaccaccaccaatgttaacctcacctaatgactttccaaattgggttaaaacatacatcaaatttttacaaaactcgaatctcggtggtattattccgacagtaaacggaaaacccgtacgtcagatcactgatgatgaactcaccttcttgtataacacttttcaaatatttgctccctctcaattcctacctacctgggtcaaagacatcctatccgttgattatacggatatcatgaaaattctttccaaaagtattgaaaaaatgcaatctgatacccaagaggcaaacgacattgtgaccctggcaaatttgcaatataatggcagtacacctgcagatgcatttgaaacaaaagtcacaaacattatcgacagactgaacaataatggcattcatatcaataacaaggtcgcatgccaattaattatgagaggtctatctggcgaatataaatttttacgctacacacgtcatcgacatctaaatatgacagtcgctgaactgttcttagatatccatgctatttatgaagaacaacagggatcgagaaacagcaaacctaattacaggagaaatctgagtgatgagaagaatgattctcgcagctatacgaatacaaccaaacccaaagttatagctcggaatcctcaaaaaacaaataattcgaaatcgaaaacagccagggctcacaatgtatccacatctaataactctcccagcacggacaacgattccatcagtaaatcaactactgaaccgattcaattgaacaataagcacgaccttcaccttaggccaggaacttactgaatctacggtaaatcacactaatcattctgatgatgaactccctggacacctccttctcgattcaggagcatcacgaacccttataagatctgctcatcacatacactcagcatcatctaatcctgacataaacgtagttgatgctcaaaaaagaaatataccaattaacgctattggtgacctacaatttcacttccaggacaacaccaaaacatcaataaaggtattgcacactcctaacatagcctatgacttactcagtttgaatgaattggctgcagtagatatcacagcatgctttaccaaaaacgtcttagaacgatctgacggcactgtacttgcacctatcgtaaaatatggagacttttactgggtatctaaaaagtacttgcttccatcaaatatctccgtacccaccatcaataatgtccatacaagtgaaagtacacgcaaatatccttatcctttcattcatcgaatgcttgcacatgccaatgcacagacaattcgatactcacttaaaaataacaccatcacgtattttaacgaatcagatgtcgacaggtctagtgctattgactatcaatgtcctgattgtttaatcggcaaaagcaccaaacacagacatatcaaaggttcacgactaaaataccaaaattcatacgaaccctttcaatacctacatactgacatatttggtccagttcacaacctaccaaaaagtgcaccatcctatttcatctcatttactgatgagacaacaaaattccgttgggtttatccattacacgaccgtcgcgaggactctatcctcgatgtttttactacgatactagcttttattaagaaccagtttcaggccagtgtcttggttatacaaatggaccgtggttctgagtatactaacagaactctccataaattccttgaaaaaaatggtataactccatgctatacaaccacagcggattcccgagcacatggagtcgctgaacggctcaaccgtaccttattagatgactgccgtactcaactgcaatgtagtggtttaccgaaccatttatggttctctgcaatcgaattttctactattgtgagaaattcactagcttcacctaaaagcaaaaaatctgcaagacaacatgctggcttggcaggacttgatatcagtactttgttacctttcggtcaacctgttatcgtcaatgatcacaaccctaactccaaaatacatcctcgtggcatcccaggctacgctctacatccgtctcgaaactcttatggatatatcatctatcttccatccttaaagaagacagtagatacaactaactatgttattcttcagggcaaggaatccagattagatcaattcaattacgacgcactcactttcgatgaagacttaaaccgtttaactgcttcatatcaatcgttcattgcgtcaaatgagatccaacaatccgatgatcttaacatagaatctgaccatgacttccaatctgacatcgaactacatcctgagcaaccgagaaatgtcctttcaaaagctgtgagtccaaccgattccacacctccgtcaactcatactgaagattcgaaacgtgtttctaaaaccaatattcgcgcacccagagaagttgaccccaacatatctgaatctaatattcttccatcaaagaagagatctagcaccccccaaatttccaatatcgagagtaccggttcgggtggtatgcataaattaaatgttcctttacttgctcccatgtcccaatctaacacacatgagtcgtcgcacgccagtaaatctaaagatttcagacactcagactcgtacagtgaaaatgagactaatcatacaaacgtaccaatatccagtacgggtggtaccaacaacaaaactgttccgcagataagtgaccaagagactgagaaaaggattatacaccgttcaccttcaatcgatgcttctccaccggaaaataattcatcgcacaatattgttcctatcaaaacgccaactactgtttctgaacagaataccgaggaatctatcatcgctgatctcccactccctgatctacctccagaatctcctaccgaattccctgacccatttaaagaactcccaccgataaattctcatcaaactaattccagtttgggtggtattggtgactctaatgcctatactactatcaacagtaagaaaagatcattagaagataatgaaactgaaattaaggtatcacgagacacatggaatactaagaatatgcgtagtttagaacctccgagatcgaagaaacgaattcacctgattgcagctgtaaaagcagtaaaatcaatcaaaccaatacggacaaccttacgatacgatgaggcaatcacctataataaagatattaaagaaaaagaaaaatatatcgaggcataccacaaagaagtcaatcaactgttgaagatgaaaacttgggacactgacgaatattatgacagaaaagaaatagaccctaaaagagtaataaactcaatgtttatcttcaacaagaaacgtgacggtactcataaagctagatttgttgcaagaggtgatattcagcatcctgacacttacgactcaggcatgcaatccaataccgtacatcactatgcattaatgacatccctgtcacttgcattagacaataactactatattacacaattagacatatcttcggcatatttgtatgcagacatcaaagaagaattatacataagacctccaccacatttaggaatgaatgataagttgatacgtttgaagaaatcactttatggattgaaacaaagtggagcgaactggtacgaaactatcaaatcatacctgataaaacagtgtggtatggaagaagttcgtggatggtcatgcgtatttaagaatagtcaagtaacaatatgtttatttgttgacgacatgattttattcagcaaagacttaaatgcaaataagaaaatcataacaacactcaagaaacaatacgatacaaagataataaatctgggtgaaagtgataacgaaattcagtacgacatacttggcttagaaatcaaatatcaaagaggtaaatacatgaaattaggtatggaaaactcattaactgagaaaatacccaaattaaacgtacctttgaatccaaaaggaagaaaacttagcgctccaggtcaaccaggtctttatatagaccaggatgaactagaaatagatgaagatgaatacaaagagaaggtacatgaaatgcaaaagttgattggtctagcttcatatgttggatataaatttagatttgacttactatactacatcaacacacttgctcaacatatactattcccctctaggcaagttttagacatgacatatgagttgatacaattcatgtgggacactagagataaacaactgatatggcacaaaaacaaacctaccgagccagataataaactagtcgcaataagtgatgcttcgtatggcaaccaaccgtattataaatcacaaattggcaacatatatttacttaatggaaaggtaattggaggaaagtccaccaaggcttcattaacatgtacttcaactacggaagcagaaatacacgcgataagtgaatctgtcccattattaaataatctaagttacctgatacaagaacttaacaagaaaccaattattaaaggcttacttactgatagtagatcaacgatcagtataattaagtctacaaatgaagagaaatttagaaacagattttttggcacaaaggcaatgagacttagagatgaagtatcaggtaataatttatacgtatactacatcgagaccaagaagaacattgctgatgtgatgacaaaacctcttccgataaaaacatttaaactattaactaacaaatggattcattag

SEQ ID NO: 191116 - DNA, 946 bp, Saccharomyces pastorianus
atgagtgcccaaaaagtatgttcctacatgttaatttcgagggggagatgtcaatttacattcacgaaggcataagttttgaaatttgatatgatgccatcaatctcagacatatccatacaagaaacaataagatcaggacgtcgaacaaaataatacaatgaaaactgataaatgacgttatacagtgtacagtgaggataaatgattaaggcagtatacctttcaacacaatgttaatactatgagtgagaaggtgagcaaagcaataaggtatatcgaccctagctcatgattatttagtttccaaacaaaggcccacgttacagtttcaaatcgctaggcataatctctccctataaaaatttatcaccattcgcaaatcaagaatactaacattagtcgtttgatatttcttttttccatttaggctccaaagtggtatccatccgaagacgtcgctgctctaaagaagaccagaaaggctgctcgcccacaaaagttgcgtgcctctctagttccaggtaccgtcttgatcttactagctggtcgtttcagaggtaagagagttgtttacttgaagcatctagaagacaacactttgttgatttctggtccattcaaggtcaatggtgttcctttgagaagagtcaatgctcgttacgtcattgctacctctactaaggtttctgtcgaaggtgtcaacgttgaaaaattcaatgtcgaatactttgctaaggaaaaattgactaagaaggaaaagaaggaagctaacttgttcccagaacaacaaaacaaggaaatcaaggctgaacgtgttgaagaccaaaaggttgtcgacaaggctttgattgctgaaatcaagaagactccattattgaagcaatacttgtctgcttctttctctttgaagaacggtgacaagccacacatgttgaaattttaa

SEQ ID NO: 191117 - DNA, 855 bp, Saccharomyces pastorianus
atgacaggatctttaaacagacactcacttttgaacggggtaaaaaaaatgagaataatattatgcgatacaaacgaagtagttaccaatctctggcaggaatctataccccatgcatatattcaaaatgataagtatctttgtattcatcatgggcaccttcaatctcttatggattcaatgcgtaaaggtgatgcaatccatcatggccactcttacgcaattgtttcacctggtaactcgtatggctatcttggaggagggttcgataaagctttgtataattatttcgggggaaagccctttgaaacatggttcaggaatcagcttggaggaagatatcacacggtcggatctgctacagtggttgacctacagcgatgtcttgaagagaaaacaattgaatgtagagatggtattaggtatattattcatgttccgaccgttgtagccccatcagctcctatatttaatccgcagaatcccctcaagacagggtttgaaccggttttcaacgccatgtggaatgccttgatgcattctccaaaagacattgatggtcttattattcctggattatgtactgggtatgcaggtgtaccacccattatcagttgcaagagtatggcctttgcgttaagactatatatggcgggagatcacataagcaaagaattgaaaaatgtgctgatcatgtattatttgcaatatccgtttgaaccttttttcccggaaagttgcaaaatagagtgccaaaaactaggaatagatatcgaaatgctgaaatcctttaatgtagaaaaagatgcaatagaattgctcattcctagaaggattttgaccttggatttataa

SEQ ID NO: 191118 - DNA, 976 bp, Saccharomyces pastorianus
atgtcagctgtcccaagtgttcaagtatgttttcagttctgcagaatgatgtttgatagtatcgataatggagtgagatcaagagaaaaaaaatgaatatgtcagccaaccaagttctgagtaggcagtaaatgagtacgcatagtgtatttatccaaaggaaagaattgttatttttacaagccgaattgagatccaattaggcaatgttttggggagagtattttgacaagattggttaaactactacggtcagttccgtaaccagtacgattgtacacataaggaaacaactgtaaagataaacaataagggcttccaatgccattgtaagatatcatattcctaaacaaaaatgtacagcgaatataaagccagcgtcagtgtcttcctggaaggttgcgcaactaaagaagttgaaattaaaatggcaagcgctacattttcatccattttcactcatcagatgtccaagattttcgaaaaataaatattctcatttttctctcaatgaaataattgttactaacattgaatttcctcgtaactaattgcattacttctttagacttttggtaagaagaaatcagctactgctgttgcccatgtcaaggccggtaagggtttgatcaaggttaatggttctccaatcactttggttgaaccagaaatcttaagattcaaggtttacgaaccattattgttagttggtttggacaaattctccaacatcgatattagagttagagttactggtggtggtcatgtttcccaagtttacgccatcagacaagctattgctaaaggtttagttgcttaccatcaaaaatatgtcgatgaacaatccaagaacgaattgaagaaggctttcacttcttacgacagaaccttgttgattgctgattctagaagaccagaaccaaagaaattcggtggtaagggtgctcgttccagattccaaaaatcttaccgttaa

SEQ ID NO: 191119 - DNA, 195 bp, Saccharomyces pastorianus
atgaattgtttatgtttatgttctttatactcaaaatcaataagtgcttattttagcgaattttcttctacgaatatatataagtcatatctaagacttccatccgtgctttattacgtttgtatgatgcatacaatgatgccaaatcagcttgatgctgttggtattcagtcgtccgaaagcctgttgatgtga

SEQ ID NO: 191120 - DNA, 728 bp, Saccharomyces pastorianus
atgttgatgccaaagcaagaaagaaacaaaattcaccaatacttgtttcaaggtatgtttgcattttttaggtgaaatatgcagtgatatgctccgaaatggatagcaaagatgataaatgaaaatacaattaaattgaacttgaatatcattaaaagtggtagaaaaccgattgtttcaaaaagatctttgtggacaagtacggcagtgcatgaatccgaaagaaaagtgcaacctaagcagaattccattatttcacgcgtccatttttataatgtttgaacttttgagtccttatagaaatgctaatattatgatcaaagcgattatatcatttactttacagtttccggagtttccgtattattgcaaaaggaccacaaacaattgaaatcatgatatcgtaagaaatattattactaacaaggaagatcattgaattacgatcgcatatcgaaatagaaggtgttgtcgtcgctaagaaggatttcaaccaagctaagcacgaagaaattgataccaagaacttgtatgttatcaaggctttgcaatccttgacttctaagggttacgttaagactcaattctcatggcaatactactattacactttgactgaagaaggtgttgaatacttgagagaatacttgaacttgcctgaacacattgtcccaggtacctacattcaagaaagaaacccatcccaaagacctcaaagaagatactaa

SEQ ID NO: 191121 - DNA, 144 bp, Saccharomyces pastorianus
atggcacacaaatgtgcaagtgccaagctattgagtggaataatggccttgttatttaatggtaagagccttctgaggccaatctgccttcacgtacacaaccaccttgttagtaacagtgataccaacatagtttggccgtga

SEQ ID NO: 191122 - DNA, 237 bp, Saccharomyces pastorianus
atggatagcaaagaatatctgatatcatatggttggaaagaaggagaagcgtttagagaaggtggtttgaaaagacccatactggtaaagcacaagagagataagaagggattgggtaatgctcctggcgggaatgatggcgaagcatggtgggaaaggctatttgatggacatctgaagaacctggatgtaagcactgattcgaataatggcagtattaaatttactccaaaatga

SEQ ID NO: 191123 - DNA, 243 bp, Saccharomyces pastorianus
atgatcactatgaagatgttcttgtttttaaacgaggcatgcatctttatagattctgtatgcgaaggtattgttttctggggcctttgtctattcgtatgcgccgaatgtgagaatgccagttataggggtgccgaggtgccttataaaacccttttccgttcctgtgatacttccatttttggtgtagcagaatgtctgaatttagttgctatagatcctcgttcagaagcgtattgctaa

SEQ ID NO: 191124 - DNA, 375 bp, Saccharomyces pastorianus
atggtcaaattaacttcaatcgctgccggtgttgccgccatcgctgccggtgttgccgctgctccagccactaccactctatctccatctgacgaaagagtcaacttggtcgaattgggtgtttacgtctccgatatcagagctcatttggctcaatactacttgtttcaagcagctcatccaactgagacctacccagttgagattgctgaagctgttttcaactatggtgacttcaccaccatgttgactggtattccagctgaacaagtcaccagagtcatcactggtgtcccatggtactccactagattgagaccagctatttccagtgctctatctaaggacggtatctacactgctattccaaaatag

SEQ ID NO: 191125 - DNA, 1917 bp, Saccharomyces pastorianus
atgaatcaacctcaaattggcacttacaatgtaggtacacagttaacagttgggtcacatcaggttgagatcattaaatatctaacaagcggtgggttcgctcaagtatattccgcgttaatcaacccacctgacccacattctaattcaagcgttgcatgcttaaaaagagtcattgttccagacaaacctagtctaaacactttaagagctgaagtagatgctatgaggttgctgaaaaacaataggtatgttgtatcttacattgattctcatgcagctaaggcaatgttacataatggttcgtatgaagtattcgtcttaatggaatattgtgaaagaggtggtctcattgattttatgaacacaaggctacaaaacaggcttcatgaatttgaaattttgcaaataatgagccaagttactcaaggagttgccgctatgcatgctttgcaacctccgttaattcaccgtgatataaagatagaaaatgttcttatctcagccaataatgagtacaagctttgtgactttggttctgtatgcggtattataaggcctcctaggaattcacaagagctatcatatgttcagcaagacattttgaaaaacacaactgcacagtaccggtcgccagagatgattgatacatttcgcggtctgccgatagatgaaaagtcggatatatgggcgctgggtatttttctatataagctttgctattacacaacaccgtttgaaaagggcggtgatcttgccatattaagcggaaagtttgaatttccattgtatccgaactacagtgaacagttgaaaggcttaatacgtgatatattggttcaagatccgcgccataggcctaacgtttatcaactactgaagaggatatcaattatgcaaaatgttccgtgtccaataaatgacatacaagtggttcaggcgcccagtagccatttgaatttgaccgaacttcatcagctttcggcaacacaaaatattctaagcttgaactctcccacaaccatggaaaatacgatgccgaacgctacatttcaaatcagcatggctgataatactacaacagcacaaatgcatcctaatagaaaaccatcacaaatagcatatgacgctagcttcagtaattccgccaaaggttctcaaccactttttgacaaatcacagaatatgtaccacgcattggatcctccacttgttgaaccgctagcgagtagtgtttcaaataatgacaacgaactcaaggcaaattccgcaaccaagttaaagcaggcaattgtctctgaagcacatacttttaggcagaataattcaatagactttccactacaaaacataataccccagtacgaagattcttcttcctcttcagatgaatcttattctggagacgtagatgaattaaagaaaactcgatctctaggttcttattccacacgcggtaacataaaaaaaaaccaatccgtaaaggaatctcttacttcatcaagcctaccaggcactagcttcaccccaacgtctacaaaggtaaatttgaaacacgaaaattcaccttttaagtcgacattcgttaatacgattgataattccaaagacgatcttaacaaaccatcttatgaagatttggacgtatctaagcagaatttgaagaactccattcaacagcgtatgatcgataaactcaactcttctgaggagtcattcaacgctaggaaaatgtccaaggtcaagctgcatgagaaaggggagatagataagccaacaatgctgaaatcaagtggcccgatttcaaaagacaaaaaaacaaaacctaccccaccacctaagccttcacatttaaagcctaaacctcctccaaaaccactgctcctcgcgggacgaaagttatccttggataagtga

SEQ ID NO: 191126 - DNA, 1170 bp, Saccharomyces pastorianus
atggctagttattctttagttgaatcgaattctttcgggtcagaaaattggtgtcttaagttacagcctagttataaacatggtcttttaactggattaagtaatggcgaaatacgtttgctagactggagtactggtaaatcagtacaaaagattaaggcgagcgaaactgcaatcaatgatatgaaggtcatcggtagcgacttctctgctggtcatctagttagtagcgcctctatcgacgcggtgaaagttttcgatataaggacgaatgaccgcattgctcaaattcaaaacgaggccaactccccctttatttccttagattctcgtcatggtctattggcctgtggtaccgaattgcagggaattgacgctgctgtatacatatatgatattcgcaaatgggacactccattgagatcattaattgactctcaccatgatgacgttacctgtattaaatttcatccttctgacgtcaatattttgctcagtggttcaactgatggttacacgaacatttatgacttgaaacaagatgaggaggaggacgctttacaccaagttattaattatgcgtcaatacattcctgtggatggttgtccccaaagaggatatttacactatcacatatggaaacatttgcaattcacgaattgaacgacaaatctgacgaattgaaagagccacaacccttggactttggtgatgtaagagaaatatggaactgtgactacgtggtagatatttaccctggactcattgcaaccggtaaaacccaagaaaattgtggagagttgtgcctcctaccatttaaagatgagaaggtggatactgaaaacggtattgttatcccacacgcccatggagacgaggtcgtcagagatatttttataccagcacaacatagcaacatgttatactcctgtggtgaagatggttgcgttaaaatttgggaaaacaaacaggggccgttagatattccagaaaatttttgggattactctaaaaaaatgaacgtcttaggagatgacgacagagaaggttccattaatttagacgaacctcttattattcaaaaagaatcggtttccacgaggccaaggaaggagaaacacaagaaagccaagaaacattccatgaaaagtcgtttcaaaccatactag

SEQ ID NO: 191127 - DNA, 5251 bp, Saccharomyces pastorianus
atggaatcccaacaattatctcaacattcacccatttctcatggtagcgcctgtgcttcggttacttctaaggaagtccacacaaatcaagatccgttagacgtttcagcttccaaaattcaagaatatgataaggcttccactaaggctaactctcaacagacaacaacacctgcttcatcagctgttccagagaacccccatcatgcctctcctcaaactgctcagtcacattcaccacagaatgggccgtacccacagcagtgcatgatgacccaaaaccaagccaatccatctgattggtcattttacggacgcccatctatgattccgtatacaccttatcaaatgtcgcctatgtactttccacctgggccacattcacagtttccgcagtatccatcatcagttggaacgcctctgagcactccatcacctgagtcaggtaatacatttactgattcatcctcagcggactctgatatgacatccactaaaaaatatgtcagaccaccaccaatgttaacctcacctaatgactttctaaattgggttaaaacatacatcaaatttttacaaaactcgaatctcggtggtattattccgacagtaaacggaaaacccgtacgtcagatcactgatgatgaactcaccttcttgtataacacttttcaaatatttgctccatctcaattcctacctacctgggtcaaagacatcctatccgttgattatacggatatcatgaaaattctttccaaaagtattgaaaaaatgcaatctgatacccaagaggcaaacgacattgtgaccctggcaaatttgcaatataatggcagtacacctgcagatgcatttgaaacaaaagtcacaaacattatcgacagactgaacaataatggcattcatatcaataacaaggtcgcatgccaattaattatgagaggtctatctggcgaatataaatttttacgctacacacgtcatcgacatctaaatatgacagtcgctgaactgttcttagatatccatgctatttatgaagaacaacagggatcgagaaacagcaaacctaattacaggagaaatccgagtgatgagaagaatgattctcgcagctatacaaatacaaccaaacccaaagttatagctcggaatcctcaaaaaacaaataattcgaaatcgaaaacagccagggctcacaatgtatccacatctaataactctcccagcacggacaacgattccatcagtaaatcaactactgaaccgattcaattgaacaataagcacgaccttcatcttaggccagaaacttactgaatctacagtaaatcatactaatcattctgatgatgaactccctggacacctccttctcgattcaggagcatcacgaacccttataagatctgctcatcacatacactcagcatcatctaatcctgacataaacgtagttgatgctcaaaaaagaaatataccaattaacgctattggtgacctacaatttcacttccaggacaacaccaaaacatcaataaaggtattgcacactcctaacatagcctatgacttactcagtttgaatgaattggctgcagtagatatcacagcatgctttaccaaaaacgtcttagaacgatctgacggcactgtacttgcacctatcgtaaaatatggagacttttactgggtatctaaaaagtacttgcttccatcaaatatctccgtacccaccatcaataatgtccatacaagtgaaagtacacgcaaatatccttatcctttcattcatcgaatgcttgcgcatgccaatgcacagacaattcgatactcacttaaaaataacaccatcacgtattttaacgaatcagatgtcgactggtctagtgctattgactatcaatgtcctgattgtttaatcggcaaaagcaccaaacacagacatatcaaaggttcacgactaaaataccaaaattcatacgaaccctttcaatacctacatactgacatatttggtccagttcacaacctaccaaagagtgcaccatcctatttcatctcatttactgatgagacaacaaaattccgttgggtttatccattacacgaccgtcgcgaggactctatcctcgatgtttttactacgatactagcttttattaagaaccagtttcaggccagtgtcttggttatacaaatggaccgtggttctgagtatactaacagaactctccataaattccttgaaaaaaatggtataactccatgctatacaaccacagcggattcccgagcacatggagtcgctgaacggctcaaccgtaccttattagatgactgccgtactcaactgcaatgtagtggtttaccgaaccatttatggttctctgcaatcgaattttctactattgtgagaaattcactagcttcacctaaaagcaaaaaatctgcaagacaacatgctggcttggcaggacttgatatcagtactttgttacctttcggtcaacctgttatcgtcaatgatcacaaccctaactccaaaatacatcctcgtggcatcccaggctacgctctacatccgtctcgaaactcttatggatatatcatctatcttccatccttaaagaagacagtagatacaactaactatgttattcttcagggcaaggaatccagattagatcaattcaattacgacgcactcactttcgatgaagacttaaaccgtttaactgcttcatatcaatcgttcattgcgtcaaatgagatccaacaatccgatgatcttaacttccaatctgacatcgaactacatcctgagcaaccgagaaatgtcctttcaaaagctgtgagtccaaccgattccacacctccgtcaactcatactgaagattcgaaacgtgtttctaaaaccaatattcgcgcacccagagaagttgatcccaacatatctaaatctgatatccttccatcaaagaagagatctagcaccccccaaatttccgatatcgagagtactggttcgggtggtatgcatagattagatgttcctttacttgctcccatgtcccaatctaacacacatgaatcgtcgcacaccagtaaatctaaagatttcagacactcagactcgtacagtgacaatgagactaatcatacaaacgtaccaatatccagtacgggtggtaccaataataaaactgttccgcagacaagcgaacaggagactgagaaaaggattatacaccgttcaccttcgatcgatacttcctcatcagaaagtaattcactacaccacgtcgttcctatcaaaacgtcagatacctgtcctaaggagaatacagaggaatctataattgctgatcttccacttcccgatctgcctccagaacctcctaccaaattatcagactcctttaaagaacttccaccgatcaattctcgtcaaactaattccagtttgggtggtattggtgactctaatgcctatactactatcaacagtaagaaaagatcattagaagataatgaaactgaaattaaggtatcacgagacacatggaatactaagaatatgcgtagtttagaacctccgagatcgaagaaacgaattcacctgattgcagctgtaaaagcagtaaaatcaatcaaaccaatacggacaaccttacgatacgatgaggcaatcacctataataaagatattaaagaaaaagaaaaatatatcgaggcataccacaaagaagtcaatcaactgttgaagatgaaaacttgggacactgacaaatattatgacagaaaagaaatagaccctaaaagagtaataaattcaatgtttatcttcaacaggaaacgtgacggtactcataaagctagatttgttgcaagaggtgatattcagcatcctgacacttacgactcaggcatgcaatccaataccgtacatcactatgcattgatgacatccctgtcacttgcattagacaataactactatattacacaattagacatatcttcggcatatttgtatgcagacatcaaagaagaattatacataagacctccaccacatttaggaatgaatgataagttgatacgtttgaagaaatcactttatggtttgaaacaaagtggtgcaaactggtatgaaacgatcaaatcatatctgattgaacaatgtgatatggaagaagttcgcggatggtcatgcgtatttaagaatagtcaagtaacaatttgcttattcgttgatgatatgatattgttcagcaaagacttaaatgcaaataagaaaatcataacaacactcaagaaacaatacgatacaaagataataaatctgggtgaaagtgataacgaaattcagtacgacatacttggattagagatcaaatatcaaagaagcaagtacatgaaattaggtatggaaaaatctttgacagaaaaattacccaaactaaacgttcatttaaatccaaaaggaaaaaaacttagcgctccaggtcaaccaggtctttatatagaccaggatgaactagaaatagatgaagatgaatacaaagagaaggtacatgaaatgcaaaagttgattggtctagcttcatatgttggatataaatttagatttgacttactatactacatcaacacacttgctcaacatatactattcccctctaggcaagttttagacatgacatatgagttaatacaattcatgtgggacactagagataaacaactgatatggcacaaaaacaaacctaccaagccagataataaactagtcgcaataagcgatgcttcatatggtaaccaaccatattacaagtcacaaattggtaacattttcctactcaacggaaaagtgattggaggaaagtcgacaaaggcttcgttaacatgcacttcaactacagaagcagaaatacacgcagtcagtgaagctattccgctattgaataacctcagtcaccttgtgcaagaacttaacaagaaaccaattattaaaggcttacttactgatagtagatcaacgatcagtataattaagtctacaaatgaagagaaatttagaaacagattttttggcacaaaggcaatgagacttagagatgaagtatcaggtaataatttatacgtatactacatcgagaccaagaagaacattgctgatgtgatgacaaaacctcttccgataaaaacatttaaactattaactaacaaatggattcattag

SEQ ID NO: 191128 - DNA, 2907 bp, Saccharomyces pastorianus
atgtccagaatagattcagatctgcagaaagcgcttaaaaaggcgtgttccgttgaggagaccgcacctaagagaaagcacgtacgcgcatgcatagtgtacacatgggaccatcagtcttccaaagctgtttttacaacccttaagacgctgcctctggccaatgacgaagtgcaactgttcaagatgcttattgtactgcataagatcatacaagagggacatccgtcagcgctagctgaggccatccgggatagggactggatcagatctctgggtagggtacattctggcggttcgtcgtacagcaaactgattcgggagtatgtgcggtacctggttttgaagctggactttcatgcgcaccatagagggtttaacaacgggacgtttgagtacgaggagtatgtgtcactggtttcagtttccgacccggacgaagggtacgagacgatcttagatttgatgtcgttacaggattctcttgacgagttctcgcagatcatctttgcgtcgattcagtccgagaggagaaatactgagtgcaaaatttcggcgctgatcccgttgattgcggagtcatatggtatttataaattcatcacctcgatgctgagagctatgcacaggcaattgaatgatgcggagggtgacgctgctctgcagcccttgaaagaacggtacgagttgcaacatgcaaggctgtttgagttttacgcggactgctcttctgtgaagtacttgaccacgttagtaaccattccaaaactacccgtggacgctccagacgtatttttaatcaacgatgtggacgagtcaaaagagattaagttcaaaaaaagagagccctctgtaactccagcgcggacgccggcacggactccaacaccaacaccacctgttgttgctgagccggctatttccccacgtccggtatctcaaaggactacttcgacgcctacgggttacttgcaaactatgccgacgggtgccaccactgggatgatgatccccactgccactggtgcacgtaacgccatttttccacaggcgacggcacaaatgcagccggacttctgggccaatcaacaagcccagtttgcgaacgagcaaaaccgtctcgagcaagagcgtgtgcaacagttgcaacaacagcaggcacagcaggaactgtttcaacagcagttacaaaaagcacaacaggatatgatgaatatgcagcttcaacaacaaaaccaacatcaaaacgatttaattgccctcaccaatcaatatgaaaaggaccaggctttattgcagcaatatgaccaaagagtgcagcagctggaaagtgaaatcacaacgatggattctacagcttccaaacaattggctaataaggacgagcaactaactgcattgcaggatcaattggatgtttgggaaagaaaatatgagtctttagccaagctatactcccagttgcgtcaagagcatctaaatcttttacctcgttttaaaaaactgcagttaaaggtgaatagtgcgcaggaatccattcagaaaaaggaacagttagaacacaaattgaagcaaaaggatttgcaaatggccgagttggttaaggaccgtgacagggcaaggttagaattagaaagatccattaataatgcagaggcggacagtgcagcggcgacagcagcagcagaaacaatgactcaggataaaatgaaccctattctggatgccatattggaaagcggtatcaacaccatccaggaatcggtctataatctcgattctcctttgagttggtcgggtccgctgactccacccactttccttttgtccttattggaaagtacttctgaaaacgccactgagtttgccaccagtttcaataatttgatagtagacggccttgcacacggcgaccaaacagaggtcatacactgcgttagtgatttcagtacttcgatggctacactggtgaccaattcaaaggcgtacgccgttactacattacctcaagaacagtctgatcaaattttgaccctggtgaagagatgtgccagagaggcccaatatttcttcgaggatttgatgtctgaaaatcttaaccaggtcggtgatgaggagaaaactgatatcgtcatcaatgccaacgtggacatgcaagagaagttgcaagagctatctttggctatcgaaccgttattgaacatacaatctgtcaaatcaaataaagaaacgaacccacattctgaattggttgccactgctgacaaaattgtcaaatcctcagaacacttacgtgttgacgttcctaaaccattgttgtcattggcattaatgattattgatgctgttgtggctttggtaaaggctgctattcagtgccaaaatgaaattgccaccacgacaagtattcctctgaaccaattctacttgaaaaacagcagatggacagaaggtttgatctccgcggcaaaggctgtggcaggtgcaaccaatgttttaatcactactgctagtaagttaatcacttctgaagacaatgaaaacacatcacctgaacaatttatcgtcgcctccaaagaagtggccgcatccacaatacaattggtagcagcatcgagagtgaaaacttccatccactcgaaggcccaagataaattggaacactgttccaaagatgttaccgatgcatgcagaagtttgggtaaccacgtcatgggtatgattgaagatgatcattcgacttcgcaacagcagcaaccattggacttcacatccgaacacacattgaagactgccgaaatggaacagcaagtggaaattttgaagttagaacaatccttgagcaatgccaggaagagattgggcgagataagaaggcatgcctactataaccaggatgatgattga

SEQ ID NO: 191129 - DNA, 297 bp, Saccharomyces pastorianus
atgaagtcaagtattccaatcaccgaagtattgccaagagcagtgggttcgctaacattcgatgaaaattacaatttactggatacatcaggtgtcgcaaaagtcatcgaaaagtcaccaatcgcagaaataatcaggaaatcaaatgccgagttaggtaggctgggctactccgtctacgaagatgctcaatatataggtcatgccttcaagaaagctggccattttattgtgtacttcactccaaagaacaagaacagagagggcgttgttcctcctgtaggaataaccaattag

SEQ ID NO: 191130 - DNA, 1509 bp, Saccharomyces pastorianus
atgacaaaatcagacgaaacaacagctaccagcttgaatgccaaaactctaaagagttttgaatccactcttccaataccaacttatccaagagaaggtgttaaacaaggtattgttcatctgggagtcggtgcattccaccgttcccatttagctgttttcatgcaccgtctgatgcaggagcaccacttaaaggattggtccatatgtggtgttggtttaatgaaagcagatgcacttatgcgcgatgccatgaaggcccaagattgcctatacacccttgtggagcgtggtatcaaggacactaacgcttatatcgtcggttctattactgcttacatgtacgctcccgatgatccaagagctgttattgaaaagatggccaatccagacacacacattgtttctttgacggtcacagaaaacggttactaccacagtgaagcaacaaactccttaatgacagatgctcccgagattatcaatgatttgaaccacccagaaaagccagatactctgtatgggtatctatatgaggccctgttgttgcgttacaagagaggtcttaccccattcactattatgtcatgtgacaacatgccccaaaatggtgtcacagtaaagaccatgcttgttgcatttgccaagttaaagaaggatgagaaattcgccgcctggattgaagacaaggttacttctcctaacagcatggtggaccgtgtgaccccacgttgtaccgataaagagcgtaaatacgttgctgacacctggggaatcaaggatcaatgtcccgttgtcgcagaacctttcatccaatgggttcttgaagacaacttctccgatggccgtcctccatgggaacttgttggtgttcaggtcgtcaaggatgtcgattcctacgaattgatgaagttgcgtctacttaacggtggacattctgctatgggatatttgggatacttggcaggctacacctatatacatgaggttgtcaacgacccaactatcaacaagtatatccgtgttttgatgcgtgaggaagttatcccattattgcctaaagtgccaggtgttgatttcgaagagtacactgcatcagtgttggaaagattctccaatccagctattcaggacactgtcgcacgtatttgtttgatgggctctggtaagatgcctaagtatgttttgccatcaatttacgagcaattgcgtaaaccagatggtaagtacaagttattggcagtatgtgttgctggctggttccgttacctgactggtgtagacatgaatgggaagccattcgaaatcgaggatcctatggcaccaaccttgaaggcagccgcagttaagggtggtaaagatcctcacgaactgctcaacattgaggtgcttttcagtcctgagattcgtgacaacaaagaattcgttgcacagttgacccactccctagaaacagtttatgataaagggccaattgccgctattaaggaaattttagaccaagtgtga

SEQ ID NO: 191131 - DNA, 93 bp, Saccharomyces pastorianus
atgccaattataggggtgccgaggtgccttgaaaaccccttttgcgcgcctgcgaagtttccgctttcggtcaaaaagaaaatccgaatttag

SEQ ID NO: 191132 - DNA, 255 bp, Saccharomyces pastorianus
atgcacggcacttgcctcagcggtctataccctgagccatttacccataactcccacgattatccacattttaatatctatatctcattcggcggccccaaatattgtataactgctcttaatacatacgttataccacttttgcaccatatactaaccactcaatttatacacacttatttcaatatacccacaaaatcaccaccaaaatcacctaaacataaaaattatttatctttcaactttacgaaataa

SEQ ID NO: 191133 - DNA, 96 bp, Saccharomyces pastorianus
atgaaatacatggggtccttcctgaggaaagcggctacaacaaatttattcaatagcataaaaaaaaggaaggtacaaaacagagccatgtcatag

SEQ ID NO: 191134 - DNA, 1188 bp, Saccharomyces pastorianus
atgtgggggttatgcaagaagcattttccgagcaataaaattcaagtgcaggagagaaacaaagcattaaaaccaaagaagagtggcagcgaacataagacaaagcaactgtttcctgtattcaattgcaagaagaaggaaaaaggggtaatgatacggtttgcgattctacgtaatgctaacacatctctactgtccgcgagaagtatatgcttatttacccaggcgcctacctattgtcatgtaaggttgaataccttgaataaaagcattacaactaaaagaaattcattgacagagtcgaaaaggcatgtccatgatggcaagcatttttttacgacgccacatcaacagcaacagacgaagttgggggaaattgaagagggacacagtcctaacataaaaggagaggacttgagaagcattggtcaagcaataacacatcagcgaaacaagcgccgaaagcaaatatggtccgccatatttggtggtatattcggtgtgatattaggatactcactaatctatagagtgatatatttaaaggaacaaagtttcttaccattgtttccatcatccaagatacgtaaactgagtaccagagatttgaaaaaggttgacgtaaaccaagtacagaagctttctaaattaagggttttagagatattatccggtcatgacatgatcaaggaacaatacggagtaccattgcttgataaagatggcaattcacccacgttaaatgaattcagcatgtggtgcgaagatcaagatccatgtgtaactggtattgtaatggagccagacgataaaagggatagttcgcacacttggtatagaataccctttgtttgcaaatggaggataacgcatcggccaataagtatacggggaaccatcgacgatttactgaaccgcattggtttggaaacagccgatttatttgagattatatcgccggagagggtatacgggtcgttcaagtacgaatacccactgcagggggactcacatgcattacacctttggtttcatggcgaaatcgaactggacgatgattctttgattgtatataatggaaaataccacgttgatgttaaattgcaagaaatcgacctcttcagacgtgaaaagaacggacaactaatacagtacgttctatacaaaaacgaagcgggcgacaagtaa

SEQ ID NO: 191135 - DNA, 939 bp, Saccharomyces pastorianus
atggtttcattgactacaatagagcaaagcccagtcaaatgcgagacaaccactgagaaagagagcaatgatactagggggacagattcgaacgagaatgcagagacaaaagaaacaaagaagggttttccattccatgacttggcaaaattgcagaaacagtacaaaaataaatccagtaggaacgagtcactagtagcactaatatatctcttgggttcgatgctgtcattttgtctcctaatatttttcacggacttttatttgatacctttgttccccaccaccactacaatgacagactacattgtattcaatttttatttattgaacgtttttgtattttgtatggtgcatttcatttatcacttcgtcaaaaatatttctctacaacaacatctcgaacattggcagaagttttcgtatttatcgaatatcaacttattgatatcatcacaaatcacaattctttattatctattctatgattacgtgtttttcttcaaaatttttacccttttaatgaacttcataggattagtggcatacttttttatattgacggacaaactcatttcctcgaaaagattcaataaaacagttttcttcatttcggtatcagtagtgtgttgttccttgccactattaaccgcaataatcacctttgatggtttagaaaacctgaaagagaggataaaagtgaacgcaattacgtgggaacttgtggctttggtagcggcatctataatttacgttaccaggttccctgaatcattgttcagacgaaataaaaaggaagaaggttggaatcattccgagtaccttttccatctcttgatttctggtacggctttttaccattttttcattttgattcaatcttatattttgatgcattcaagtttgaatcagcccgaattaattaatttcaagtcttag

SEQ ID NO: 191136 - DNA, 5269 bp, Saccharomyces pastorianus
atggaatcccaacaattatctaattacccacaaatttctcatggtagcgcctgtgcttcggttacttctaaggaagtccacacaaatcaagatccgttagacgtttcagcttccaaaacagaagaatgtgagaaggcttccactaaggctaactctcaacagacaacaacacctgcttcatcagctgttccagagaacccccatcatgcctctcctcaacctgcttcagtaccacctccacagaatgggccgtacccacagcagtgcatgatgacccaaaaccaagccaatccatctggttggtcattttacggacacccatctatgattccgtatacaccttatcaaatgtcgcctatgtactttccacctgggccacaatcacagtttccgcagtatccatcatcagttggaacgcctctgagcactccatcacctgagtcaggtaatacatttactgattcatcctcagcggactctgatatgacatccactaaaaaatatgtcagaccaccaccaatgttaacctcacctaatgactttccaaattgggttaaaacatacatcaaatttttacaaaactcgaatctcggtggtattattccgacagtaaacggaaaacccgtacgtcagatcactgatgatgaactcaccttcttgtataacacttttcaaatatttgctccctctcaattcctacctacctgggtcaaagacatcctatccgttgattatacggatatcatgaaaattctttccaaaagtattgaaaaaatgcaatctgatacccaagaggcaaacgacattgtgaccctggcaaatttgcaatataatggcagtacacctgcagatgcatttgaaacaaaagtcacaaacattatcaacagactgaacaataatggcattcatatcaataacaaggtcgcatgccaattaattatgagaggtctatctggcgaatataaatttttacgctacacacgtcatcgacatctaaatatgacagtcgctgaactgttcttagatatccatgctatttatgaagaacaacagggatcgagaaacagcaaacctaattacaggagaaatctgagtgatgagaagaatgattctcgcagctatacgaatacaaccaaacccaaagttatagctcggaatcctcaaaaaacaaataattcgaaatcgaaaacagccagggctcacaatgtatccacatctaataactctcccagcacggacaacgattccatcagtaaatcaactactgaaccgattcaattgaacaataagcacgaccttcaccttaggccaggaacttactgaatctacggtaaatcacactaatcattctgatgatgaactccctggacacctccttctcgattcaggagcatcacgaacccttataagatctgctcatcacatacactcagcatcatctaatcctgacataaacgtagttgatgctcaaaaaagaaatataccaattaacgctattggtgacctacaatttcacttccaggacaacaccaaaacatcaataaaggtattgcacactcctaacatagcctatgacttactcagtttgaatgaattggctgcagtagatatcacagcatgctttaccaaaaacgtcttagaacgatctgacggcactgtacttgcacctatcgtaaaatatggagacttttactgggtatctaaaaagtacttgcttccatcaaatatctccgtacccaccatcaataatgtccatacaagtgaaagtacacgcaaatatccttatcctttcattcatcgaatgcttgcacatgccaatgcacagacaattcgatactcacttaaaaataacaccatcacgtattttaacgaatcagatgtcgactggtctagtgctattgactatcaatgtcctgattgtttaatcggcaaaagcaccaaacacagacatatcaaaggttcacgactaaaataccaaaattcatacgaaccctttcaatacctacatactgacatatttggtccagttcacaacctaccaaaaagtgcaccatcctatttcatctcatttactgatgagacaacaaaattccgttgggtttatccattacacgaccgtcgcgaggactctatcctcgatgtttttactacgatactagcttttattaagaaccagtttcaggccagtgtcttggttatacaaatggaccgtggttctgagtatactaacagaactctccataaattccttgaaaaaaatggtataactccatgctatacaaccacagcggattcccgagcacatggagtcgctgaacggctcaaccgtaccttattagatgactgccgtactcaactgcaatgtagtggtttaccgaaccatttatggttctctgcaatcgaattttctactattgtgagaaattcactagcttcacctaaaagcaaaaaatctgcaagacaacatgctggcttggcaggacttgatatcagtactttgttacctttcggtcaacctgttatcgtcaatgatcacaaccctaactccaaaatacatcctcgtggcatcccaggctacgctctacatccgtctcgaaactcttatggatatatcatctatcttccatccttaaagaagacagtagatacaactaactatgttattcttcagggcaaggaatccagattagatcaattcaattacgacgcactcactttcgatgaagacttaaaccgtttaactgcttcatatcaatcgttcattgcgtcaaatgagatccaacaatccgatgatcttaacatagaatctgaccatgacttccaatctgacatcgaactacatcctgagcaaccgagaaatgtcctttcaaaagctgtgagtccaaccgattccacacctccgtcaactcatactgaagattcgaaacgtgtttctaaaaccaatattcgcgcacccagagaagttgaccccaacatatctgaatctaatattcttccatcaaagaagagatctagcaccccccaaatttccaatatcgagagtaccggttcgggtggtatgcataaattaaatgttcctttacttgctcccatgtcccaatctaacacacatgagtcgtcgcacgccagtaaatctaaagatttcagacactcagactcgtacagtgaaaatgagactaatcatacaaacgtaccaatatccagtacgggtggtaccaacaacaaaactgttccgcagataagtgaccaagagactgagaaaaggattatacaccgttcaccttcaatcgatgcttctccaccggaaaataattcatcgcacaatattgttcctatcaaaacgccaactactgtttctgaacagaataccgaggaatctatcatcgctgatctcccactccctgatctacctccagaatctcctaccgaattccctgacccatttaaagaactcccaccgataaattctcatcaaactaattccagtttgggtggtattggtgactctaatgcctatactactatcaacagtaagaaaagatcattagaagataatgaaactgaaattaaggtatcacgagacacatggaatactaagaatatgcgtagtttagaacctccgagatcgaagaaacgaattcacctgattgcagctgtaaaagcagtaaaatcaatcaaaccaatacggacaaccttacgatacgatgaggcaatcacctataataaagatattaaagaaaaagaaaaatatatcgaggcataccacaaagaagtcaatcaactgttgaagatgaaaacttgggacactgacgaatattatgacagaaaagaaatagaccctaaaagagtaataaactcaatgtttatcttcaacaagaaacgtgacggtactcataaagctagatttgttgcaagaggtgatattcagcatcctgacacttacgactcaggcatgcaatccaataccgtacatcactatgcattaatgacatccctgtcacttgcattagacaataactactatattacacaattagacatatcttcggcatatttgtatgcagacatcaaagaagaattatacataagacctccaccacatttaggaatgaatgataagttgatacgtttgaagaaatcactttatggattgaaacaaagtggagcgaactggtacgaaactatcaaatcatacctgataaaacagtgtggtatggaagaagttcgtggatggtcatgcgtatttaagaatagtcaagtaacaatatgtttatttgttgacgacatgattttattcagcaaagacttaaatgcaaataagaaaatcataacaacactcaagaaacaatacgatacaaagataataaatctgggtgaaagtgataacgaaattcagtacgacatacttggcttagaaatcaaatatcaaagaggtaaatacatgaaattaggtatggaaaactcattaactgagaaaatacccaaattaaacgtacctttgaatccaaaaggaagaaaacttagcgctccaggtcaaccaggtctttatatagaccaggatgaactagaaatagatgaagatgaatacaaagagaaggtacatgaaatgcaaaagttgattggtctagcttcatatgttggatataaatttagatttgacttactatactacatcaacacacttgctcaacatatactattcccctctaggcaagttttagacatgacatatgagttgatacaattcatgtgggacactagagataaacaactgatatggcacaaaaacaaacctaccgagccagataataaactagtcgcaataagtgatgcttcgtatggcaaccaaccgtattataaatcacaaattggcaacatatatttacttaatggaaaggtaattggaggaaagtccaccaaggcttcattaacatgtacttcaactacggaagcagaaatacacgcgataagtgaatctgtcccattattaaataatctaagttacctgatacaagaacttaacaagaaaccaattattaaaggcttacttactgatagtagatcaacgatcagtataattaagtctacaaatgaagagaaatttagaaacagattttttggcacaaaggcaatgagacttagagatgaagtatcaggtaataatttatacgtatactacatcgagaccaagaagaacattgctgatgtgatgacaaaacctcttccgataaaaacattcaaactattaacaaacaaatggattcattag

SEQ ID NO: 191137 - DNA, 648 bp, Saccharomyces pastorianus
atgggccttttggcttatatccctacgaacgttttggccacatacctgactttggtattgagaagtatcggtttcacaacctttcaagccaacctgctagctattcctaactttgttcttcatattctcctgctgtttggtttaacatggtcgacagaaaaatgtaataacaggctaggtttgagtctgttacaaccgttgtacactgttcctcttcttgcagttcttcgcttttggaaaggtacaatgtttaataaatggggaacttatgcaattattaccttaatattagataatccgtatatccatgcaatttgtgtatccttgtgttctagaaactcccaatcagttaaaacaagaacagtatctacttgcttgtacaatatgttcgtgcaagcaggtctcatcatatcctcaaacatttatgcgaaaagcgatgccccactctatcgtaagggaaatggagttctttttggtttggcactttttatgtttccaatattaattggtagcaaattgatttatgtctatatcaacaagcagagggataagaggtggaatgcaatgtcagaagaggaaaaagaccactatctaagtactactagtgatgctggttcacgtagactcgattttagattctatcactga

SEQ ID NO: 191138 - DNA, 510 bp, Saccharomyces pastorianus
atgatagcgtggtccctagtggctacgttgcaatgcaaaatgacagggaagagttctttctatacatgtagagcacttatgggcctatttgaaggtggttttgtggctgatttggttctctggatgtcgtacttctacagctcttcagaattgtcaataagactgtcgttcttctgggtgacactatctctaacacaaatcatcacttcaattgtggccttcggggtttttcacatgagagggataggtggcatggcagggtggcaatggctttttttgatagaaagaattttcactttagtcatcggtatcagtgcatacttcttgatggtaccctccgtagttcaaacgaagaaaccttggagcaagaaaggatggttcactgagagggaagaaaaaatcatcgtaaacaagattctgagagatgatccgacaaaaggggatatgaacaataggcaaggtatgtcacttaaaatgttatggcaggggataacagattactatatatag

SEQ ID NO: 191139 - DNA, 1941 bp, Saccharomyces pastorianus
atgattggtgcctttaagaggaaccgtggaagttctcagtcttttgcgaaggaatgtcaaccttctacgttaaaagccaaccttgaagtggcaaaagaacttccattctcagatcgtcgcgatttcgaggatgccactcaaggttacatcggctccttatctgatgagcaaataatcggccctgacggcggtgtagtatggtgtatgaaatcttatggctttttggagcctgagacgcccgcaaatactgttaaccctagcttgtggagacaagcgcagctgaatgccattcatggcctatttaaaatcactgacaacgtttaccaggttagaggactagatatctctaatatgactataatcgaaggtaatacttctttgataatcattgatacgctttttaccacagagactgcccaagagtcgcttaaactttactatagacatcgtcctcagaaacctgtgcgtaccgtaatatatacgcatagccattcggaccactatggaggagttaaaggaattgtcaaggaagcagatgtgaaatccggagaggtgcaaataatagccccagttggcttcatggaaagtgttgtagcagaaaacattctggcagggaatgcgatgcatcgacgttcccaatatcagtttggtatgttactttctcccagtgttaagggtcatgttgattgtgggatagggaaagctgcctctcacggaacagttacactgattgcaccaactattattatagaagagcccgtcgaagaacggacaattgatggtgtagattttgtttttcagcttgcacctggatcggaagcgccttcggaaatgctcatttatatgccacaacagcgtgtgctcaacatggcagaagatgtgacacatcatatgcataacttgtatgctcttcgaggtgttgaagtacgcgacggcaaccaatgggctaaatacatcgatgcagctcgagttgctttcggtagcaaaacggacgttttaattgcccagcatcactggcccactacagggcaaatgcggatcaatgaattgctgaagaagcagcgggatatgtataaattcattcatgaccaaacacttcgattgcttaatcagggatataccagtagagatatcgccgaaactcttcgtatgccatccagtcttgagcaagaatggtcaacacgaggttactacggcactttgagtcacaatgtaaaggctgtgtatcaaaaatacctggggtggtatgatgcaaatccggctaacctaaaccctttgccacccgtagcctatgcaaagaaagcagtcgagtatatgggcggcgctgatgctgtattggcacgggcttataaagatttccagaaaggagagtttcgttgggttgcaagcgttgttaatcaattggttttcgctgacccaaataaccatcaagctcgtgagctctgtgctgacgcattggaacagctggggtatcaagcagaagccagcacgtggcgcaacgcttaccttgtaggcgccatggagttgcgccaaggtgtaccaaaaagacgaagtactggtaagcgcaacaatattgccgttttgaataacgaaatgttttttgactttcttgctgtgagattgaacgctacgaaagcagaaggtaaaattatcgttagtaattggtgtttcattaattcaaatgaacggttcgtgatcactctcgaaaactgtgccctgacctacattcagggctggcagacagatgcagatgcaacaattactctcaaaagaactacatttgaagctttattggccaatgaaattactatggttgattttttaagatcaaaagaagtcgaaatagagggtaatcgactcagaattgaagagctgttgaagttgtttgacgacttcgaccagtcctttcccgtcgttgagcctatggggggaagcacttga

SEQ ID NO: 191140 - DNA, 183 bp, Saccharomyces pastorianus
atgtttgctaagctttatcgcggtcttacttacgttaccaacaaaattctatctacattgctatcacatcattccatacattattgcataaattcctttaagccgactacattggcaattataattcttctacacccctgttgccgttgtaatgtttacattattagatgcatccaccattaa

SEQ ID NO: 191141 - DNA, 432 bp, Saccharomyces pastorianus
atggctaggcatttcggtatggccctcgccccatgggatgtcatgggaggtggaagatttcagagtaaaaaagcaatggaggaacggaggaagaatggagagtgtattcgttctttcgttggcgcctccgaacaaacagatgcagaaatcaagattagtgaagcattagccaaggttgctgaggaacatggcactgagtctgttactgctattgctattgcctatgttcgctctaaggcgaaaaatgtttttccgtcggttgaaggaggaaaaattgaggatctcaaagagaacattaaggctctcagtatcgatctaacgccggacaatataaaatacttggaaaatgtagttccttttgacatcggatttcctaacacttttatcgtgttaaattccttgactcaaaaatatggtacgaataatgtttag

SEQ ID NO: 191142 - DNA, 339 bp, Saccharomyces pastorianus
atgcatgttctgtatagtacatccgcgcatattcttcctagcggaaggcatattaacgtagcccgcacgccctggttaagacttgatatagtttcaataattggaatattactgcatagtggcccaattgcaggatttagcataaacatgataatatttagagatgctttcatccctttgacgaaggtgatagagaacaagaaaatgaataacattatatcatattcctatatatatatatatatatatatatgtcatataacggtggaaaatcccggcgatattacagataaacattacacccgcatgaatgtgagccactactatattataacttag

SEQ ID NO: 191143 - DNA, 156 bp, Saccharomyces pastorianus
atgcacggcgcttgcctcagcggtctataccctttgccatttacccataaattccatgattatctacattttaatatctatatctcatttggcggcccaaaatattgtataactgcccttaatacatacgttatactattttacaccgtatactaa

SEQ ID NO: 191144 - DNA, 348 bp, Saccharomyces pastorianus
atggcttcagtgaaacaaaccaacaaaactctccgagagggcaatccagagcatagcacaatcttttacatccgcggaagcattcttgctccgtcatatttccttccggacttcgctcggactctttttccgcggaaagatatggtctccgtcggtcctctgtttcctattatatttgcgcacagtgacagtgcggcaattgatatgtcagggaccactggaaaacgacgttgcctagtagttgtggcagctccgatagttgacattctcattagtaaccgaacttcttgcaccaagtcctgtgcgagtgctgcacggccatgccttgagggttctgtcgccccctag

SEQ ID NO: 191145 - DNA, 974 bp, Saccharomyces pastorianus
atgtctgctccacaagccaagattttgtctcaagctccaactgaattggaattacaagttgctcaagctttcgttgaattggaaaattcttctccagaattgaaagctgagttgagacctttgcaattcaagtccatcagagaagtatgttattaatttgaatctaaacttaagaataatggagagtaacaaaggaaaaaagtgtgaacgggacgataccagaatgtttcaatctagaaaagtataaaagataaggactaggactcaaatgtatttggctgactatcgcctgaaccttgatgctaagcaaataccatatcttcaagaaaaagcctactccagtgtttaagaagaagggaacgatttactagatcatgctatacgcagtaaggttctgatagttaattacaatcggtccaagttctaagcggtgtcgtccatgcatatatcatttacaagttactggcgtcaactcttcaaatattcaaaatatcacctaatcaaacttactaacattttccttttttgttttccttcttttatagatcgacgttgctggtggtaagaaggctttggccatttttgttccagtcccatctttggctggtttccacaaggttcaaactaagttgacccgtgaattggaaaagaaattccaagaccgtcatgtcatcttcttggctgaaagaagaatcttgccaaagccatctagaacatctagacaagtccaaaagagaccaagatccagaaccttgactgctgttcatgacaagatcttggaagacttagtcttcccaactgaaatcgttggtaagagagttagatatttggttggtggtaacaagatccaaaaggttttgttagactcaaaggatgtccaacaaatcgactacaaattggaatctttccaagctgtttacaacaaattgactggtaagcaaattgttttcgaaattccaagtgaaactcattag

SEQ ID NO: 191146 - DNA, 930 bp, Saccharomyces pastorianus
atgcagggaaataaatcaactataagagagtataagatagtagttgtcggtggaggtggcgttggtaaatctgctttaacaattcaattcattcaatcatactttgtggacgaatatgaccctactatcgaagattcttacagaaaacaagttgtcatcgatgacaaagtatccattttggacattctagatactgctggacaagaagagtattctgcgatgagagaacagtacatgaggactggggaaggtttcctactggtctattccgtcacctctagaaattcctttgatgagttactgtcttattatcagcaaattcaaagagtaaaagattctgactacattcctgtagtcgtggtaggtaacaaattggaccttgaaaatgaaagacaagtctcttatgaagacgggttacgcctggccaagcagttgaatgcaccctttctagaaacgtctgcgaaacaagccatcaacgtagacgaggccttttatagccttattcgtttggtaagggacgacggtgggaaatacaatagcatgaatcgtcaactggataatacgaatgaaataagagattcggagctaacctcatctgcaacagcggatagagaaaaaaagaacaacgggtcttatgtactcgataattctttgaccaatgctggcactggctccagttcaaagtcagccgttaaccataacggtgaaactactaaacgaactgatgaaaagaattacgttaatcaaaacaataacaatgaaggaaataccaagtactccagtaacggcaacggaaatcgaagtgatattagtcgtggtaatcaaaataatgccttaaattcgagaagtaaacagtctgctgagccacaaaaaaattcaagcgccaacgctagaaaagaatctagtggtggttgttgtataatttgttga

SEQ ID NO: 191147 - DNA, 5314 bp, Saccharomyces pastorianus
atggaatcccaacaattatctcaaaattcacccacttttcatggtagcgcctatgcttcggttacttctaaggaagtcccatcaaatcaagatccgttagccgtttcagcttccaatttaccggaatttgatagagattccactaaggttaattctcaacaagagacaacacctgggacatcagctgttccagagaaccatcatcatgtctctcctcaacctgcttcagtaccacctccacagaatggacagtaccaacagcacggcatgatgaccccaaacaaagctatggcttctaactgggcacattaccaacaaccatctatgatgacgtgttcacattatcaaacgtcacctgcgtattatcaaccggacccacactatccgctgccacagtatatcccaccgctgagtacttcctcacctgatccaatcggttcacaggatcaacactctgaagtacctcaagctaagacaaaggtgagaaataatgtcttaccaccacacactttaacatcagaagaaaacttttctacatgggttaaattttacatcagatttttgaagaactctaatctcggtgacattattccaaatgaccagggtgaaatcaaaagacaaatgacttatgaagaacatgcgtatatatacaataccttccaagcatttgccccatttcatttattgccaacatgggtaaaacaaattttagaaattaattattctgacatccttacagtcctttgtaaaagtgtgtccaaaatgcaaactaacaatcaagaattaaaagattggatagctcttgccaaccttgagtacaacggaagtacatctgctgatacatttgaaattacagtcagcacgatcattcaaaggctaaaagaaaacaatatcaatgttagcgacagattggcctgtcaactaatacttaaaggtctatccggtgacttcaaatacctacgtaatcaatatcgtaccaaaacgaacatgaaactttcccaattattcgctgaaattcaattaatatatgacgaaaataaaatcatgaatctaaataaaccgtcccaatacaaacaacacagcgaatacaaaaatgtttctcgcacatctccaaacacgactaacacgaaggttacaactcgtaattatcatagaacaaatagttcaaaaccaagagcagcaaaagctcacaatattgctacatccagtaaattctcaagggtgaacaatgatcacattaatgaatcaaccgtttcatcacaatacttaagcgatgacaacgaacttagtcttaggccagcaacagaaagaatctaagccaacacgcacaatagactcgaatgacgaactacctgatcaccttcttattgattcaggagcttcgcaaacgcttgtcagatcagcccattatttacaccatgcaacacccaattctgaaataaacatagtcgatgctcaaaaacaagacattcctataaatgccattggtaatcttcacttcaactttcagaacggcaccaaaacatcaataaaagcactacacacaccaaacatagcctatgatctattaagtttgagtgagctggctaaccaaaatattactgcctgctttaccagaaacactttagaaagatcggatggtacagtactagctcccatagtcaaacatggagacttttactggttatctaaaaaatacctaattccttcgcacatttcaaagctaacaataaacaacgtcaacaaaagcaaaagcgtaaataaatatccatatccgttaatacatcgaatgcttggacatgctaacttccgaagtattcagaagtctcttaagaagaatgcagttacatatttgaaagaatcggatattgaatggtctaacgctagcacatatcaatgtcctgactgtctaatcggcaaaagcacgaaacataggcatgtcaaaggatcacgactaaagtaccaagaatcatatgagccttttcagtacttgcataccgatatatttggtcctgtacatcacttaccgaaaagtgcaccttcttactttatatcgtttacagatgagaaaaccagattccaatgggtgtacccattacacgaccgtcgtgaagaatctatcctcaatgtttttacatcgatattagcatttattaagaaccaattcaatgctcgcgttctagttatccagatggatcgtggctccgagtacactaacaaaactcttcataagttctttacgaacagaggtattactgcatgctatacaaccacggcagattctagagcacacggtgtcgctgaacgattaaatcgtactttattaaacgattgtcgcacactgcttcattgcagtggtctaccaaatcatctatggttctcagcagtcgaattttctactataatcagaaattcattagtctcaccaaaaaacgataaatctgcaagacaacatgcaggtttagctggactggacattactactatactacctttcggtcaaccggttatagttaacaaccataatcccgactcgaaaatacatcctcgtggcattccaggttacgccttacatccatcacgaaactcttatggctatattatctatcttccatccttaaaaaagacagtagatactaccaattacgttatattacaaaacaagcaaacgaaattggaccagttcgactacgatacactcacttttgatgatgatctcaatcgtttaacagcccataaccaatcttttattgaacaaaatgaaacggagcagtcatatgatcaaaatacagaatctgatcatgactatcaatcggagattgaaataaactctgatcctctagtgaacgatttctcgtcccaatcattgaaccctttacaattagacaaggaaccagtccaaaaggtacgtgcaccaaaagaagttgatgccgacatatctgaatacaatattcttccatctactatacgatctcgtacaccccatatcattaataaagagagtaccgaaatgggtggtaccattgaatcagatactacttcacctagacactcgtctaccttcactgcacgaaaccaaaagcgacctggtagtcccaacgatatgattgatttgacctcacaggatagagttaattatggacttgaaaacatcaaaactacacgtttgggtggtacggaggaaccatatattcaacgaaatagtgatacaaatatcaaatacaggactacaaatagtacgccctcaatagatgaccgttcgtccaacagtgaatccactactcccatcatctccatagaaacaaaggctgcatgtgataatacaccctccattgatacggatccgccagaatatcgatcttctgaccatgcgactcctaatataatgcctgacaaatcctcaaaaaatgttacggctgattctattcttgacgacctcccacttcctgacttaacccatcaatctcctacggacacttctgatgtttcaaaagatattccacacatacactctcgtcagactaattccagtttgggtggtatggatgattctaatgttctgactactaccaaaagtaagaaaagatcattagaagataatgaaactgaaattgaggtatcccgagacacatggaataataagaatatgagaagtctggaaccaccaagatcgaagaaacgcataaatttaattgcagcaataaaaggagtgaaatcgatcaaaccagttcgaacgaccttaagatatgatgaagcaattacttataataaagacaacaaagaaaaagacagatatgttgaagcttatcataaagaaattagccaactattgaaaatgaacacttgggatacaaacaaatattatgatagaaatgacatagatcctaaaaaagtaataaactcaatgtttatatttaacaagaaacgtgatggtacacacaaagctagatttgttgcaagaggcgacattcaacaccccgatacatatgattctgatatgcaatccaataccgtacatcactatgcactgatgacgtcactgtcaatcgcattagacaacgactattatatcacacagctggacatatcctctgcttacttatatgctgatatcaaagaagaattatacataagacctccaccacatttaggtttgaatgataaattactacgtttgagaaaatcactctatggtttgaaacaaagtggtgcaaactggtatgaaaccattaaatcatatttaataaattgttgcgacatgcaagaagttcgcggatggtcatgcgtatttaagaatagtcaagtaacaatttgcttattcgttgacgacatgattttatttagcaaagacttaaatgcaaataagaaaatcataacaacactcaagaaacaatacgatacaaagataataaatctgggtgaaggtgataacgaaattcagtacgacatacttggattagagatcaaatatcaaagaagcaagtacatgaaattaggtatggaaaaatccttgacagaaaaattacccaaactaaacgtacctttgaacccaaaaggaaagaaacttagagctccaggtcaaccaggtcattatatagaccaggatgaactagaaatagatgaagatgaatacaaagagaaagtgcatgaaatgcaaaagttgattggtctagcttcatatgttggatataaatttagatttgacttactatactacatcaacacacttgctcaacatatactattcccctctaggcaagttttagacatgacatatgagttaatacaattcatgtgggacactagagataaacaattaatatggcacaaaaacaaacctaccaagccagataataaactagtcgcaataagcgatgcttcatatggtaaccaaccatattacaagtcacaaattggtaacattttcctactcaacggaaaagtgattggaggaaagtcgacaaaggcttcgttaacatgcacttcaactacagaagcagaaatacacgcagtcagtgaagctataccgctattgaataacctcagtcaccttgtgcaagaacttaacaagaaaccaattattaaaggcttacttactgatagtagatcaacgatcagtataattaagtctacaaatgaagagaaatttagaaacagattttttggcacgaaggcaatgagacttagagatgaagtatcaggtaataatttatacgtatactacatcgagaccaataagaacattgctgatgtgatgacaaaacctcttccgataaaaacatttaaactattaactaacaaatggattcattag

SEQ ID NO: 191148 - DNA, 237 bp, Saccharomyces pastorianus
atgatgataataatatttatagaattgtgtagaattgcagattccctttcatggattcctaaatccttgaggagaacttctagtacattctacatacctaatattattgccttattaaaaatggaatcccaacaattatctcaaaattcacccacttttcaaaaacacacgccgattggtcatattaatcatgaccaatataatagtgattccggtagttactatacattgatgtga

SEQ ID NO: 191149 - DNA, 330 bp, Saccharomyces pastorianus
atgaaaataagacctggagaaaacctatcacgtctgacgaacatgaaaaaactaagtcaaaatttgatacataatgtcactagtattatgactgtttctgatattaattacttattattatacctaattattcttttaaccctttctataaaacaaccagaaaaaaaaaaccggaaagagaggacctcttgtattttatcatattatcgtatcgcctctctttcaatgcaaaacggaggggttcctctttgttttgtagtccttgattgccgccttgatagcgtcttctgcaagcatggaacaatgcagttttactggaggaagacttag

SEQ ID NO: 191150 - DNA, 315 bp, Saccharomyces pastorianus
atgggtttatacaggccgtcaaaattttttcacccccccataccccacataccttttactattaaccctgattttttttcttttcacatacagcgccttaaggcgaaggcaaatcctgaaaattttctcatttgctttcccccaccagacatatataaaggctttgtattctgctgtcaattagatttagtacatcttttctcttatgttttcttcttgtttctacttaaaatctgtgtcgacgtacttcagtatgtaatataccccaaacattttacccacaaaaaaccaggatttgaaaactatagcatctaa

SEQ ID NO: 191151 - DNA, 5314 bp, Saccharomyces pastorianus
atggaatcccaacaattacatcaaaatccacattgtccacatggtagcgcctatgcttcggttacttctaaggaagtcccatcaaatcaagatccgttagccgtttcagcttccaatttaccggaatttgatagagattccactaaggttaattctcaagaagagacaacacctgggacatcagctgttccagagaaccatcatcatgtctctcctcaacctgcttcagtaccacctccacagaatggacagtaccaacagcacggcatgatgaccccaaacaaagctatggcttctaactgggcacattaccaacaaccatctatgatgacgtgttcacattatcaaacgtcacctgcgtattatcaaccggacccacactatccgctgccacagtatatcccaccgctgagtacttcctcacctgatccaatcgattcacaggatcaacactctgaagtacctcaagctaagacaaaggtgagaaataatgtcttaccaccacacccacacacatcagaagaaaacttttctacatgggttaaattttacatcagatttttgaagaactctaatctcggtgacattattccaaatgaccagggtgaaatcaaaagacaaatgacttatgaagaacatgcgtatatatacaataccttccaagcatttgccccatttcatttattgccaacatgggtaaaacaaattttagaaattaattattctgacatccttacagtcctttgtaaaagtgtgtccaaaatgcaaactaacaatcaagaattaaaagattggatagctcttgccaaccttgagtacaacggaagtacatctgctgatacatttgaaattacagtcagcacgatcattcaaaggctaaaagaaaacaatatcaatgttagcgacagattggcctgtcaactaatacttaaaggtctatccggtgatttcaaatacctacgtaatcaatatcgtaccaaaacgaacatgaaactttcccaattattcgctgaaattcaattaatatatgacgaaaataaaatcatgaatctaaataaaccgtcccaatacaaacaacacagcgaatacaaaaatgtttctcgcacatctccaaacacgactaacacgaaggttacaactcgtaattatcatagaacaaatagttcaaaaccaagagcagcaaaagctcacaatattgctacatccagtaaattctcaagggtgaacaatgatcacattaatgaatcaaccgtttcatcacaatacttaagcgatgacaacgaacttagtcttaggccagcaacagaaagaatctaagccaacacgcacaatagactcgaatgacgaactacctgatcaccttcttattgattcaggagcttcgcaaacgcttgtcagatcagcccattatttacaccatgcaacacccaattctgaaataaacatagtcgatgctcaaaaacaagacattcctataaatgccattggtaatcttcacttcaactttcagaacggcaccaaaacatcaataaaagcactacacacaccaaacatagcctatgatctattaagtttgagtgagctgactaaccaaaatattactgcctgctttaccagaaacactttagaaagatcggatggtacagtactagctcccatagtcaaacatggagacttttactggttatctaaaaaatacctaattccttcgcacatttcaaagctaacaataaacaacgtcaacaaaagcaaaagcgtaaataaatatccatatccgttaatacatcgaatgcttggacatgctaacttccgaagtattcagaagtctcttaagaagaatgcagttacatatttgaaagaatcggatattgaatggtctaacgctagcacatatcaatgtcctgactgtctaatcggcaaaagcacgaaacataggcatgtcaaaggatcacgactaaagtaccaagaatcatatgagccttttcagtacttgcataccgatatatttggtcctgtacatcacttaccgaaaagtgcaccttcttactttatatcgtttacagatgagaaaaccagattccaatgggtgtacccattacacgaccgtcgtgaagaatctatcctcaatgtttttacatcgatattagcatttattaagaaccaattcaatgctcgcgttctagttatccagatggatcgtggctccgagtacactaacaaaactcttcataagttctttacgaacagaggtattactgcatgctatacaaccacggcagattctagagcacacggtgtcgctgaacgattaaatcgtactttattaaacgattgtcgcacactgcttcattgcagtggtctaccaaatcatctatggttctcagcagtcgaattttctactataatcagaaattcattagtctcaccaaaaaacgataaatctgcaagacaacatgcaggtttagctggactggacattactactatactacctttcggtcaaccggttatagttaacaaccataatcctgactcgaaaatacatcctcgtggcattccaggttacgccttacatccatcacgaaactcttatggctatattatctatcttccatccttaaaaaagacagtagatactaccaattacgttatattacaaaacaatcaaacgaaattggaccagttcgactacgatacactcacttttgatgatgatctcaatcgtttaacagcccataaccaatcttttattgaacaaaatgaaacggagcagtcatatgatcaaaatacagaatctgatcatgactatcaatcggagattgaaataaactctgatcctctagtgaacgatttctcgtcccaatcattgaaccctttacaattagacaaggaaccagtccaaaaggtacgtgcaccaaaagaagttgatgccgacatatctgaatacaatattcttccatctactatacgatctcgtacaccccatatcattaataaagagagtaccgaaatgggtggtaccattgaatcagatactacttcacctagacactcgtctaccttcactgcacgaaaccaaaagcgacctggtagtcccaacgatatgattgatttgacctcacaggatagagttaattatggacttgaaaacatcaaaactacacgtttgggtggtacggaggaaccatatattcaacgaaatagtgatacaaatatcaaatacaggactacaaacagtacgccctcaatagatgaccgttcgtccaacagtgactccactactcccatcatctccatagaaacaaaggctgcatgtgataatacaccctccattgatacggatccgccagaatatcgctcttctgaccatgcgactcctaatataatgcctgacaaatcctcaaaaaatgttacggctgattctattcttgacgacctcccacttcctgacttaacccataaatctcctacggacacttctgatgtttcaaaagatatcccacacatacactctcgtcagactaattccagtttgggtggtatggatgattctaatgttctgactactaccaaaagtaagaaaagatcattagaagataatgaaactgaaattgaggtatcccgagacacatggaataataagaatatgagaagtctggaaccaccaagatcgaagaaacgcataaatttaattgcagcaataaaaggagtgaaatcgatcaaaccagttcgaacgaccttaagatatgatgaagcaattacatataataaagacaacaaagaaaaagacagatatgttgaagcttatcataaagaaattagccaactattgaaaatgaacacttgggatacaaacaaatattatgatagaaatgacatagatcctaaaaaagtaataaactcaatgtttatatttaacaagaaacgtgatggtacacacaaagctagatttgttgcaagaggcgacattcaacaccccgatacatatgattctgatatgcaatccaataccgtacatcactatgcactgatgacgtcattgtcaatcgcattagacaatgactattatatcacacagctggacatatcctctgcttacttatatgctgatatcaaagaagaattatacataagacctccaccacatttaggtttgaatgataagttactacgtttgagaaaatcactctatggtttgaaacaaagtggtgcaaactggtatgaaaccattaaatcatatttaataaattgttgcgacatgcaagaagttcgcggatggtcatgcgtatttaagaatagtcaagtaacaatttgcttattcgttgatgatatgatattattcagcaaagacttaaatgcaaataagaaaatcataacaacactcaagaaacaatacgatacaaagataataaatctgggtgaaggtgataacgaaattcagtacgacatacttggattagagatcaaatatcaaagaagcaagtacatgaaattaggtatggaaaaatccttgacagaaaaattacccaaactaaacgtacctttgaacccaaaaggaaagaaacttagagctccaggtcaaccaggtcattatatagaccaggatgaactagaaatagatgaagatgaatacaaagagaaagtgcatgaaatgcaaaagttgattggtctagcttcatatgttggatataaatttagatttgacttactatactacatcaacacacttgctcaacatatactattcccctctaggcaagttttagacatgacatatgagttaatacaattcatgtgggacactagagataaacaattaatatggcacaaaaacaaacctaccaagccagataataaactagtcgcaataagcgatgcttcatatggtaaccaaccatattacaagtcacaaattggtaacattttcctactcaacggaaaagtgattggaggaaagtcgacaaaggcttcgttaacatgcacttcaactacagaagcagaaatacacgcagtcagtgaagctataccgctattgaataacctcagtcaccttgtgcaagaacttaacaagaaaccaattattaaaggcttacttactgatagtagatcaacgatcagtataattaagtctacaaatgaagagaaatttagaaacagattttttggcacaaaggcaatgagacttagagatgaagtatcaggtaataatttatacgtatactacatcgagaccaagaagaacattgctgatgtgatgacaaaacctcttccgataaaaacatttaaactattaacaaacaaatggattcattag

SEQ ID NO: 191152 - DNA, 354 bp, Saccharomyces pastorianus
atggttatgttttcgctcataattgtttgtgcttcaacattaaagaatagagtattatttctcgggaaaaaagcagcttcgaaatacgatgcagaaaactgtgagtctttagcacaagtcaacagagccgaagtccttagatattctttagtatatgcatcaaatggtactgggaatagagtcgatgcgttgttcagtagtgtaaaagagttagaaacctggaaagtagagctgttaatggaaatagcgtgtatttgtcggaagattgctagcaaaacaaaaatccgagataaagagaagactttaatgggaagcatacttattctctttacatctataaatcagagaggttaa

SEQ ID NO: 191153 - DNA, 168 bp, Saccharomyces pastorianus
atgttcaatgtagcattaccatcacaagacaaaaaatcagaattttacaagcaaaagcgcttatctttaaggaccaacatattagatgaattcttaagggttgccaaaacgcaagacaacaggcaaaataatttcgtttctcagtaccgaaatgacgaaatatactga

SEQ ID NO: 191154 - DNA, 462 bp, Saccharomyces pastorianus
atgaaattctcaactattttcggagctactacagttatgactgccgtctcggcagcagctgtgtcgagtgtaatgaccactaagactattactgctactaacggtaataacgtttacactaaggtcgttaccgacaccgctgaccctatcattagttacagtaccactagaactgtcgttgtcagtaatagtgatgctacttacacaaaggttgtcaccgaaggaccagataccacctctgaaaagagtacaacaaagacacttactttgacaaacggttcaggttcatcaaccaacctttacaccaagaccgtcactcaagccgtcgaatcatctacatcctcctcatcctcctcatcctcctcctcctcttctgcctcttcttctggtgctgctcctgctgcattccaaggagcaagtgtcggtgcattggcccttggtttgatttcttacctattataa

SEQ ID NO: 191155 - DNA, 615 bp, Saccharomyces pastorianus
atgaaattctcttccgctttggttctatctgctgttgccgctactgctcttgctgagagtatcaccaccaccatcactgccaccaagaacggtcatgtctacactaagactgtcacccaagatgctacttttgtttggggtggtgaagactcttacgccagcagcacttctgccgctgaatcttctgccgccgaaacttctgccgccgaaacctctgctgccgctaccacttctgctgccgctaccacttctgctgctgagacttcttctgctgctgagacttcttctgctgatgaaggttctggttctagtatcactaccactatcactgccaccaagaacggtcacgtctacactaagactgtcacccaagatgctacttttgtctggactggtgaaggcagcagcaacacctggtctccaagtagtacttctaccagctcagaagctgctacctcttctgcttcaaccactgcaaccaccactgctgaaacttcttcctctgctacatcctctagcaccgctgaattatctagttacaccggtgctgctgatgccatcaccgctggtactggtttgatgggtgctgcccttgctgccgtcatgttattgtaa

SEQ ID NO: 191156 - DNA, 2085 bp, Saccharomyces pastorianus
atgcttttcgctagattagtgctgctgttggtgtatttggcaccaggttctttagcaaaaccagcatcaactaagaaaagaacgcaatgggaccagatagcaattgatgcttgtgctaaagaattggaatcacacaaatttgacacggatgtgaagggtcggcacgctactctttgcacttatgaaccagcactagggtcttggttacattgcgcgaaggatgttctcgacagtaggaagaaaagtaaaaaaatattcgaaaaaacgtttagcaaaattaatcagtattgccacgattatcacaaagatgaggtcgtcagcaatgaggagtattatcgaatttttgccaatgcatcccttttcatccggcctcttgatgaggtaaaggaaaacatacgatatcccgtcactcccaataaagcctctctagataggtgggtatgggcttattttgggcccctggataatatagacaaaggaaatgtttatggagtgacgatttgcttatactggataggagttctgtttattgcagctgtatatcacttcttgaacttttctcgacttaaacaaacggtgttcaaaaacaaggtgtctgctttcttaagaggccactatgttcttccagcgcttgttcataaccatgctatgtcagtgggaaggtggtttttcatcggtctggtccctaccaggttagagacccttgtcctattcggttacgttttgttgcacgggttcttgttgagtagttacaattttgaccataatgagttgctcagtgatcgcagaagccaagtgcttatcttcctttccgacagggcagggatcctggcattcgcacattttcctttgatagttctctttggcggtaaaaacagcacaatgacttggctcacaggtataagatataccgcattcattacttaccacaaatggttaggaagattcatgttagtagactgtacgatccatgcaataggatacacctaccatgcatacatagaaaattactggaaatacgtgaagtatagtgatctatggacatccggaagacatgccatgatcattgttggaatacttgtgtttttttcgttcttcttctttagacgacattattacgaattgtttgttattacgcacattatcttagcaataggatttttccatgcgtgctggaaacattgctataaacttggatggggtgaatggataatggcgtgtgcactgttttggattgctgaccgtattctgcggctaataaagattgcaatttttggaatgccatgggctaaattgaaactgtgtggcgagtccatgatagaagtgagaatctcaaaaagctccaaatggtggaaagcagaacctggccaatatatatatctgtacttcttaagaccaaaaatattctggcaatcacatccattcacggtcatggattctttggttgaggatggtgagttggtagttgtgataacagtgaaaaatgggctaaccaaaaaattacaggaataccttttagagagcgaagggtacacggaaatgcgagtactagcagaaggaccttatggacaaagcacgcgaacacatttgttcgaaagcctcctgtttattgccggaggggcgggtgttcctggacctctgtcgatggcaataaaggcaggtcgccaggtcaaaagcaacgattctcatcaaatgatcaaatttgtgtggagtgtacgtaaccttgatctcttagaagtgtatcgcaaagagataatggtgctaaaagagttgaacatagacacaaaaatttacttcacaggagagcgaaaagatgaatcgaacacggaggagggagcaattgctaatatgagcacggaaggcagactgctgacgacatcgaaatcagcggaaatgattactgattttggacgaccaaatatcgatgagataattgaagaagcagtaagtggtgcaaaatctttgttggtcacttgttgcgggtcagagggctttgtagacaagacacgagagttgacggcaaaaagagttcttgaacacggtgacaaatggatagaatacgtggaggaattccagaattggtag

SEQ ID NO: 191157 - DNA, 873 bp, Saccharomyces pastorianus
atgcgtggtttcagtggtcaaccattgagtgatgatgataattatagaattgaaaagactcaaaggaacacaattcctgaacgtctccattttagcagagagagaaatatgcccattgcaagtatattcgggactagaggatattttgtattctcaagtgagcaatcctatgacaaattcaaacagacaaactttaatatcagtactctagatgcggatggtgtaggtgttcctctttttcatattgtccaaagttataacgttattggcaaaattactcggagctcgccggatttctatatctacaagtacgttttacaaggggtgcaagatccgcctttatactctgattgtaaagttatttgtcaagataaagtttttcgtttatgcaaaattttatattgtgaaatttatgctcatcaaggattttttgaaactaaatacgatttcttctatccttctaaaacgcagccggtcaaaaaataccaaataatcaaacaaagtaatatgcgagatctatattccactttggacggtatgcgttttcgttggcatgtgaaattctacagcgatcattttcgattgatgttcctagatgaggacaggctcaattactcaaatagtaaccaaaaggaaaggcaaaaaccagatcaaggaaaaagtaaggctccagatttcgtaattggccattatacaagaactttttccgatatactccctagatccacgtcaaaatgctccaatcttattattggagaacactcaaagccagactctcttggtatcacgaccgttcctgatttgactcaggaatttgcctgtcagggagctttaatccattatctgctgcatatagaacgagaaagaaaataa

SEQ ID NO: 191158 - DNA, 1698 bp, Saccharomyces pastorianus
atgaaaagaacggtaatatcttcctcgaacgcatatgctagtaagagatctcggctggatatagaacatgattttgaacaataccactcgttgaacaaaaaatattatccaaggccaattactaggacaggcgcaaatcaattcaataataagtctcgggctaaaccaatggagattgtggaaaaactgcaaaagaagcaaaaaacgtcgtttgagaatgttagcactgtcatgcactggtttcgaaatgatctacgtttatatgataatgtgggactgtacaaaagtgttgcgctcttccagcaattgaggcaaaaaaacgcaaaagccaaattatatgctgtttatgtcatcaatgaagatgattggagagcccatatggatagcggatggaaattgatgtttataatgggggcgttaaaaaatttgcagcagtccttagccgaattacacatacctcttcttctgtgggaattccacactccaaaaagtaccttatctaattcaaaagagttcgtggagtttttcaaagaaaaatgtatgaatgtaagttcaggaacaggtacgataatcactgctaatatagaataccaaacagatgaactgtaccgtgatattaggctgttagaaaatgaagaccatagattgcaattgaaatactaccacgactcttgcattgttgctcctggattgatcactactgacagaggcaccaactattctgtgtttactccatggtacaaaaaatgggtgctatatgtaaataattacaaaaagagtacctctgaaatttgtcatttgcatataatcgaaccattaaagtacaacgaaacttttgaactgaagccattccaatattcattaccggatgaattccttcaatatatacctaaatcaaaatggtgcttgccagacgtttctgaagaagcagctttatccagattaaaagatttcctcggtacaaaaagttctaagtacaacaatgaaaaagacatgctatatttgggtggaacctctgggctaagtgtatatataactactggtaggataagcacaagacttatagtcaaccaggcatttcaatcatgcaacggacaaataatgtcaaaagcactgaaagataattcgtccacccaaaatttcatcaaagaagttgcatggagagatttttacagacattgtatgtgcaactggccatatacctcaatgggaatgccttatcgattggacactttagatataaaatgggagaataaccctgtagcatttgaaaagtggtgtactggtaatacaggcattcccatagtcgatgccataatgagaaaattactgtacacaggctatattaataacagatctagaatgatcacagcttcttttctttctaaaaacttattaatagattggagatggggggaacgctggtttatgaaacacttgatagacggtgattcgtcttcaaatgttggtggctggggtttttgttctagtacaggaattgatgcccaaccatattttagagtttttaatatggatatacaagcaaaaaaatatgacccacaaatgatattcgtcaaacaatgggttcccgaattgatttcttccgaaaataagcgtccagaaaactatccaaaacctttagttgatttaaagcatagtagggagcgtgctttgaaagtttataaagacgcaatgtga

SEQ ID NO: 191159 - DNA, 621 bp, Saccharomyces pastorianus
atgagtttcctaaacatttttacttttttcagcgtccttgtgtctgttgcaacagccgtcagatttgatttgactaacgtcacttgtaataacctacatggacctcactgtggtacctacgttatggaagtcgttggccaaaatggtacatttttgggtcaatctacgtttgctggtgccgacgttttaactgaaagcgctggtgacgcttgggcaagatatttgggccaggaaacaagattcctcccaaagttgactactattgctagcaatgatacgaagaacttttctccactaatcttcaccaccaatatctacacttgtaaccctcaatccattggtgatgctatggttccttttgctaacactgttactggtgaaattgaatacaactcttgggcagacaccgctgataatgcttccttcataaccggtttagctaaccaattgtttaactctactcagtatggcgttcaagttgcttcctgttacccaaactttgcttctgttattttgagcaccccaactgtgaacattttcgctgcgaatgagacattaccagattattgtaccgccatccagttgaaggccgtttgtccaccagacgctggttttgcttga

SEQ ID NO: 191160 - DNA, 1875 bp, Saccharomyces pastorianus
atgagattccaccgtcaaggtaccgcagccaccgtaggcgtactgctcattgtgctgcttggtttctgttggaaattatctgaatcttatggcatagtgtcaactgccctaccacacaagcaacctgcaaccaaaatcacagacacaccttctatacgatgggataattaccatgagtttgtcagagacattgattttgataacagcacggctatctttaattccattcgagctgctttaagacagtctccatcggatatacatcctgtcggagtatcttattttcccgctgtaattcccaaaggaactttaatgtaccatgccggatcaaaagtgccaactaccttcgaatggctggctatggaccacgaattcagctactctttcggcttgaggtcaccatcctatgggagaaaatctttggaaagaaggcatgggaggttcggcaatggcacccatggtgatcatccaaaagggccaccaccaccaccaccaccagacgaaaaagatcgaggttcacaaaaaatgcttacctatagagcagcacgggacctcaacaaatttctctatcttgatggggcttctgctgcaaaaactgactcaggagagatggacacgcagctaatgttgtcaaatgttattaaagagaaattgaaccttacagatgatggtgaaaacgaacgaatggccgaacgactctacgctgctagaatatgcaaatgggggaagccattcgggcttgacggaattatcagggtagaggttggctttgaggtcgttttgtgtgatttttcggctgataacgtcgaacttgtttcaatgttagaaatggtccagcctaaccagtacctaggcttaccagcacctaccgttatatcgaaagaggaaggttggcctctggatgaaaatggaaacctagttgaagatcagctaacagatgaccaaaaggcgattctggaaagagaagatggttgggagaagactttttctaatttcaacgcagttaagagcttcaatcagttgagagcgggtacagcgcatgacaacggggagcatcgaatccatatcgactataggtacctagtgagcgggataaacaggacttacattgctcctgatcctaacaacagaagattactcgatgaaggaatgacatgggaaaagcaattggacatggtagatgacttagaaaaggctctggaagtcggatttgatgccacgcaaagtatggattggcagttagcatttgatgagcttgtccttaaatttgctccattactaaaatctgttagtaacatactgaacagcaatggtgatattaatgagtcaattgccatcaatgcaacagcactcacattgaacttttgtttaaggtttgagcctgcaagcaacaacagtgatgaattcggtagcgggaaagactttgctgtctaccaatatgtgagcccataccaggccttaaaaacggatgcagactttttgatttggtcatctgctgtcagcgtggtcggagaaattgttgatgccatttataaagtgaatgatttattgatacccgaagtctactcttttatgacagataacacaacttccagcgacttaataaagaatgtcgaaacggctcgctccactatcgatggtttaattgaatctctagggtggattgaactaaattaccgttgtgagagacaatgcaattgggatgaagtttgttacactccttcctggggcccatctccaatgggtatgactgaaccaggttcccacaatgagggatttggaacccactttgatgaatctcgacaaaggttggttattaacagtaaactacagtgtatcaatataaatgatttgatggttaatcgtaatcattag

SEQ ID NO: 191161 - DNA, 1389 bp, Saccharomyces pastorianus
atggaaagatatgatagacagctgagactatggggagcattgggccaagatagtttgaaccggtcccgtgtgtgcgtggtaggacctgctacacctttgctgcaggaagtttttaagaatctggtgcttgccggaatatcatctcttacttggctcaaagtagagtgtgcagttcaatcgggttctctgtttttagcagagcttaaaaaagatcttgagccattggcttctaaacagctagaatatgaggaaaatgaccttagaaagacgttacagcaacctcagtatgattggacccgcttctcggtggtgatcttgacttgtattggtgagcaaactgcgatgctcgatttaaatgagattaggcggcagagaggaacaaagtttccgcctgttctaaacactttcgtctctggattttatggatatatatatctggtactctcagaaacacattttgttttgcaagcacacccagatagtaagaagtatgatttacggttacagaacccttggcctgaactaataaattacgtagatacatttgacctaagtaaaatggatacagccacgttttctggtattccatatactgttttgctcatgaagtgtattgcaaaacttgaaagggatggtaataatgggaggataacgattgatcagatgaagaaagttttagaccaaatttgccttcctttagggaatgatgttatctacgaacccaattatgtggaagctaaacgctatgcttacttggcctgctctcaaaatgattgttgtaaagaactggaagatctgctccgaaatttggaaatatcagattatgggaacgattggcatgatacttataactacgagattctcacactattattgactttgaaaaatattgctaaagagaatggggagctcagctttcaacctttaacgggcactctcccagatatggagtcaacaacggaaaattatatcagactcaagaaactgtatgaagtaaaagcaaagcttgacaagtctcgtgtggaggaaagtttggctcgcagtaaaaaaatagtttcacaggatgtcttggagacattttgttctcattacggggaggtcaggaaaatattgccgccaaaaagtgacttgttaggtatttttagcacctcgaatgcccttttagatgcattagttatggtccaattctgggagcaaccggcagtaactgcagaggataaagatgagtttattggtttacgagtcgacgataactattccgtaatggccttttttggaggtgcagtggttcaagaggctataaagcttatcacacaccattacgttcctattgataacctatttttatataatggcattaataattcatccgcaacatataaaatataa

SEQ ID NO: 191162 - DNA, 2508 bp, Saccharomyces pastorianus
atgctatttggtattaaactggctaacgacgtatatcctccctggaaggattcatatatcgactatgaaaggttgaagaaattactaaaggaaagcgtcatacatgatggccgtagttccgtggatagttggtccgaaaggaatgaatctgattttgtggaggccttggataaagaactagaaaaggtttacacatttcaaatttccaaatataatgctgtcttgcgaaaattagatgatttagaggaaaacactaaatcagctgaaaaaatccaaaaaataaattctgagcagttcaaaaacaccttagaagaatgtctagatgaggctcaaagattggataactttgacaggttaaattttactgggtttatcaagattgtgaagaaacacgataaattacatccaaactatccttctgtaaagtctcttttacaagtcagattgaaagaacttcctttcaacaattcagaagagtattctcccttgttgtataggatctcatatctgtacgagttcttgagatcaaattatgatcatccaaatacggtgtctaaatcattagcaagtacttctaaattatcacatttttctaaccttgaagacgcaagttttaaaagctacaagttttgggttcatgatgataatataatggaggttaaggctagaatcttaaggcatctacctgctttggtttatgcgtcggttccaaatgaaaatgacgatttcgtcgataatctagaatcagatgtccgcgtacaacctgaagcgcgcttgaatattggttcaaagagtaacagcctttctagtgatggtaatagcaaccaagatgttgaaattggaaaatcaaagagcgttattttcccacagtcatatgatccaacaatcactacattatatttcgacaacgatttttttgatttgtacaataacagattgttgaaaatcagcggtgcacctacgctgagattaagatggatcggtaaactgctagacaaacctgacatatttttggaaaagagaacttttacagaaaataccgaaactggtaattcaagttttgaagaaatcagattgcaaatgaaagccaaattcatcaacaattttatttttaaaaatgatcccagttacaaaaactatttaattaatcaactaagagaaaggggtactcaaaaggaggaactggaaaaactttctagagactttgataacatccaaaactttattgttgaggagaagttgcagccagttttgagagctacctataatagaactgctttccaaattcctggagatcaaagtattagagtcactatcgattccaatatcatgtacattagagaggattctttggacaaaaataggcccattaggaaccctgagaattggcaccgtgacgatattgattccaatattcccaacccattgaggtttttaagagcaggagaatattcgaagttcccctattctgtaatggagattaaggttataaaccaagataattctcaaatgcctaattatgagtggattaaagatttaactaattcacatttagttaacgaagttccaaaattttctttgtacttgcaaggtgtggcttcactgtttggtgaagacgataaatatgtcaacattttgccattctggttgcccgatttagaaaccgacatcagaaagaaccctcaggaggcttacgaagaagagaagaaaactttacaaaaacaaaagagcattcatgataaacttgataatatgagaaggttatccaaaatctctgtaccagatggaaagaccactgaaagacaagggcaaaaagatcagaatactcgccacgttattgcagatttagaagatcacgaatcatcagatgaagaaggtactgcattgcccaagaaatctgcagtcaaaaaagggaagaaattcaaaacgaatgcagctttcttgaaaattcttgctggaaaaaatatttcagaaaatggaaatgatccatactccgacgatacagacagtgcctcttctttccaattacctccgggagttaaaaaaccagttcaccttttgaaaaatgccggtcctgtcaaagttgaggcaaaagtttggctcgccaatgaacgtacattcaatagatggttaagtgtaaccacattgctgagtgtattgaccttttctatctataattcagtgcaaaaagccgaatttccacaactagctgatctgttggcctatgtatatttctttttgactttgttttgcggagtatgggcttatagaacctacttaaaaagattaactcttattaaaggtagaagtggtaagcatttggatgcacctgtgggacctattttggttgcagttgtattaatcgttaccttggttgttaactttagtgtggcttttaaagaggccgctaggagggaaagaggattagtaaacgtttcctcccagccttcgttaccccgtacactaaaaccaattcaagattttatcttcaatttggttggggaataa

SEQ ID NO: 191163 - DNA, 1974 bp, Saccharomyces pastorianus
atgtccatcagagatttatatcatgcgagggcttccccttttatatcgttagaattcttccctccaaagactgaattagggacgagaaatttgatggaacgtatgcatcgtatgactgctttagatccactgtttatcacggttacttggggagcaggtggtactactgcggaaaagactctgacattagcttccttggcacagcagacactaaatataccagtttgtatgcatttgacctgtacaaacacagaaaaagccatcattgatgatgcgctggatagatgttataatgcaggaatcaggaatattttggctcttcgaggtgacccacctattggggaagattggctagattctcaatcgaacgaatcaccttttaaatatgcggttgatttagttcgttatatcaagcaaagctacggagacaagttctgcgtcggtgttgcagcatatccagaaggtcattgtgaaggtgaagcagaaggtcacgagcaagacccattgaaggatttggtatatttaaaagaaaaagttgaagctggggccgattttgtgataacacaactgttttacgacgttgaaaaattcttaacttttgaaatgctatttcgggaacggatttcgcaagatttgccccttttccctgggttgatgcctattaactcctatctgcttttccacagagcagcaaagttatcacatgcatctattccacctgcaatactgagtaggttccccccagaaatccaatcggatgataatgccgtgaagtccattggtgtggacattcttatcgaattgattcaggaaatatatcaaagaacatctggtagaattaaagggtttcatttctatacattaaatttggaaaaggctattgctcaaattgtctcgcaatctcccgtcttatcccatatcgtaaatgaatctagcgaagaagagggagaagatgaaaccagtggcgaaataggaagcatagaaaatgtgccaatagaagatgctgacggggatattgtgttggatgattcgaatgaagaaactgtagcaaaccggaaaaggagaaggcattcaagtcttgattcggccaagttgattttcaatagggctatcgtcactgaaaaaggcttacgctataataatgagaatggttccatgccatctaaaaaggctttaatatctatttctaaaggtcacggaactttgggtcgtgatgccacttgggatgagttccccaatggtagatttggtgactccaggtctcccgcatatggtgaaatagacggttatgggccatccatcaaggtaagcaaaagcaaagcgcttgaactatggggtataccaaagacaattggcgatttaaaagatatttttataaaatatttggaaggttcaacggatgcgattccctggtctgacctgggtttatcagctgaaacggcgttaatacaagaagaactaatccaactaaactatcgcggatatttgactttggcatcgcaacctgccacaaatgctacattgagtagtgataaaatattcggctgggggcccgcgaaagggaggttgtatcagaaggcattcgtagaaatgtttattcatagacagcaatgggaaacaactttgaaacccaagctagaccattacgggcgtcggaaattcagttattacgcgggcgattcatctggttcatttgaaacgaacctagacccgcacagctctagcgttgtaacatggggtgtttttcccaacagtccggtcaaacagactacaatcattgaagaagagtcattcaaggcatggagagatgaagcgtttagtatctggtccgagtgggccaagttatttccaaggaacaccccagccaatattcttctaagactagtgcataaagactactgtcttgtctcaattgttcatcacgacttcaaagaaaccgacgagctatgggaaatgttactcgaccaagcctaa

SEQ ID NO: 191164 - DNA, 2844 bp, Saccharomyces pastorianus
atgtcttccactgaagcaaagcaatacaaggagaaaccctcgaaagagtacctccatgccagtgatggcgatgaccctgcaaataattctgccgcttcttcgtcatcttcgtcttctacatcaacttccgcctcgtcatcggctgcagccgttccacggaaggccgcagccgcttctgccgctgatgattctgactcagatgaagatatagaccaattgattgatgaactacaatctaactacggtgagggtgatgaatctggtgaagaagaagtacgtactgatggggtgcacgctggccaaagggttgttcctgaaaaggacctttctacggaccctgcgtatggtttgacttcggatgaagtcgccaggagaagaaagaaatatgggttaaatcaaatggctgaggagaatgaatcgttgattgtgaagtttttgatgttcttcgtagggcctattcaattcgttatggaggctgctgctattttggctgccggtttgtctgattgggttgatgtcggtgtcatctgtgctttactgctattaaacgcatctgtcggatttattcaagaattccaggcaggttccatcgtagacgagctgaaaaagacgttggccaatactgcaacagttattagagatggccaattgatcgaaattccggctaatgaggtagttcctggtgagattttgcaattggaaagtggcacaattgctcccgcagatggtcgtattgtcactgaagactgttttttgcagatcgatcaatcggccatcactggtgaatccttagccgctgaaaagcattacggtgatgaggtgttctcctcatccactgtgaaaaccggcgaggcttttatggttgttactgccactggtgacaataccttcgtcggtagggctgccgccttagtggggcaggcttccggtgtagagggccatttcactgaagtattgaatggaattggtattatcttacttgttctagttatcgctactttgttgttggtctggaccgcatgtttctatagaacggtcggtattgtaagcattttgagatatactttgggtataaccatcattggtgtcccagtcggtttgccagcagttgttaccacgaccatggctgtcggtgcagcttacttggctaagaagcaagccattgttcaaaagttatctgctattgaatcccttgctggtgttgagattttatgttctgacaagactggtactttaaccaaaaacaagttatctttacacgaaccctacactgtcgaaggcgtttctccggacgacttgatgttgaccgcttgtttagctgcctctagaaagaagaaaggtttggatgctattgataaggcttttttgaagtcattgattgagtatccaaaagctaaagacgccctgaccaagtacaaagttttggaattccatccgttcgaccctgtctcaaaaaaggttaccgctgttgtagaatccccagaaggtgaaagaattgtttgtgtcaagggagccccattgtttgtcttgaagactgttgaagaagatcacccaattccggaagatgtgcatgaaaactacgaaaataaggttgctgaactagcttctagaggtttccgtgctttaggtgttgctagaaagagaggggaaggtcactgggaaatcttgggtgttatgccatgtatggacccccctagagatgacaccgctcaaacaatcaatgaggccagaaaccttggtttgagaatcaagatgttaaccggtgacgctgttggtatcgcgaaagaaacgtgtaggcaattaggacttggtacaaacatttataacgcagaaaggttaggtctgggaggtggaggtgatatgcctggttcagagttggctgattttgttgaaaatgccgatggtttcgcagaagttttcccacagcataaatacagagtcgttgaaatcttgcaaaacagaggttacttggttgctatgactggtgatggtgttaacgatgccccatctttgaagaaggctgatactggtattgctgtcgaaggtgctaccgatgctgccagatcagccgctgatattgttttcttggcccctggtctctctgctattattgatgccttaaagacttctagacagattttccacagaatgtactcctatgttgtttatcgtattgccctatccttacatttggagattttcctgggtttatggattgctattttaaacaactctttggatatcaatttgatcgtttttattgctattttcgcagacgttgccactttaactattgcttatgacaatgctccttatgctcctgaacctgtgaaatggaacctaccaagattatggggtatgtctattattttgggcatagttttagctataggttcttggattactttaaccaccatgttcttgcctaatggtggtattatccaaaattttggtgccatgaatggtgtcatgttcctgcagatttcactaactgaaaattggttaatttttgtcactagagctgctggcccattctggtcttccattccatcgtggcagttagccggtgccgttttcgccgttgatattattgctaccatgtttaccttatttggctggtggtctgaaaactggactgatattgtgtcagtcgttcgtgtctggatttggtccattggtattttttgtgtattgggaggattttactatattatgtccacgtctcaagcctttgataggttgatgaatggtaagtcattaaaggaaaagaagtctacaagaagtgtcgaagatttcatggctgctatgcaaagagtttctactcaacacgaaaaaagcagttag

SEQ ID NO: 191165 - DNA, 1248 bp, Saccharomyces pastorianus
atgtctcaaggtactttatatgctaacttcagaattagaacttgggtcccaagaggtcttgtcaaggctttgaagctggacgttaaggttgttacgccagatgccgccgctgaacagttcgcaagggactttcccttgaagaaggttccggctttcgtgggtccaaagggttacaagctaaccgaggcaatggcgattaactattatttagtaaagctttcacaggacgacaagatgaagactcaacttttaggtgccgacgatgacttaaatgcccaagcgcaaatcatcagatggcaatctttggccaacagtgatctgtgcatccagattgccaacaccatcgttcccttgaagggcggcgccccctacaacaagaagagcgttgattctgcgatggacgctgttgacaagatcgtcgacatcttcgagaacagattgaaaaactacacctatttggctacggaaaacatctccttggccgacttggtggctgcctcgattttcaccagatactttgaaagcctgttcggtactgaatggagagctcaacatccagccatcgtgagatggttcaacaccgttagagcctcacccttcttgaaggatgaatacaaggatttcaagttcgctgacaagccattgagtccccctcaaaagaagaaggaaaagaaggccccagccgccgctcccgccgcttcgaagaagaaggaggaagccaagccagctgctaccgaaactgaaacttcttccaagaaaccaaagcacccattagaattattgggcaagtcaactttcgttttggatgactggaagagaaagtactccaatgaagacaccagaccagttgctttaccttggttttgggagcactacaacccagaagagtattccctgtggaaagtcacctacaagtacaacgatgaattgactttgactttcatgtccaacaacttggtcggtggtttcttcaacagattgtccgcctctaccaagtacatgttcggttgtctggtagtctacggtgaaaacaacaacaacggtattgttggtgcagttatggttaggggccaagattacgttccagctttcgatgtcgcaccagattgggaatcttacgactatgcaaagttggatccaactaacgacgacgacaaagaattcatcaataacatgtgggcctgggataagccagtttccgtcaatggcgaaccaaaggaaattgttgacggtaaggtcttaaaataa

SEQ ID NO: 191166 - DNA, 999 bp, Saccharomyces pastorianus
atgagcggatacacgggaaataattatagcagatactcatccactcctccgagacaaagggggggttatcaccatgcgagacgaagtagaggtggagcaggcggatcgtattacagaggcggtaatgcgtcttatggcgcgagatacaacagtgactatgagcagccgccccaagagggagacttgagacaaaccggagcatactatcgaaacggatacacagatacaaggccgtactattcagctaatagcaggcattaccaagcacaaccatcccccaggtacaacaatggtacaaattcgtaccacctaccgcaacgtggcaatagtcaagatacgaacggcaggaccacgagcgcctcgcaagaagataatgacgaaaaaagagtcaagtccagataccggaacatgcaggcagatcatccacgccaacaaccgatgagcgttggcagcaccagcagcagaaatggtagtagtgggaacagcagcactagcagcaccagcaacgggcttccgccaccaccttcagtatcgtctataaccaacaatagatcatatcacagcagtgcttatccatattccagcagccatacttacaataattaccaccaccgtgagacaccaccgcctcccccatcgaatggctattatgcaaagggttacccagtacacgtaccagaaaatagaagtaacagcgacggctctagcagcagcgtcgtcaagaagaaaagaatactagatatgaaagattccccctttatttacttgacagattttgataaaaatgtgaaaaagacaaacaacaccgaaagtgaatgtgaaaaggcgagggaagttttcaaagagagcgattccatcgattccgctttggaagaactaaacctaaaaatcaattctaatgagctagaattgcggctcctaaataaccagtgcgacaagcatgcattaaatattcaactgacccaagaaaagctggactcattgttattaatgcagtag

SEQ ID NO: 191167 - DNA, 3315 bp, Saccharomyces pastorianus
atggcgaccccagtgagggatgaaacaagaaatgttattgacgacaacatttctgcgcggattcaatcgaaagtcaaaacaaatgatactgtcagacagacgccatcatcattaagaaaagtttctattaaagatgaacaggtgaaacaatatcaaagaaacttaaataggtttaaaaccatactaaatggtttaaaggcagaagaggaaaaactttctgagactgatgatattcagatgctagctgaaaaattattaaaactcggagaaaccattgacaaggttgagaataggattgtggatctagttgaaaagatacaattattggaaacaaacgagaacaataatatattacatgaacatatagatgctacagggacttactatttattcgatacgttaacttcaaccaacaaaagattctaccctaaggattgtgtttttgattataggactaataatgtcgagaacattcctattctcttaaacaattttaaaaaattcatcaagaaatatcaatttgatgatgtctttgaaaatgatatcatagaaatcgatcctcgtgaaaatgaaatcttgtgcaagataatcaaagaaggactcggtgaaagtttagatatcatgaacacaaatacaactgacatttttaggataatcgatggtttaaaaaacaaatatagaagtttacatggtagagatgtcagaattagagcctgggaaaaggttttggttgatacaacatgtagaaattccgcattgttaatgaataaacttcaaaagttggtactaatggaaaaatggattttttctaaatgctgccaagattgtcctaatctaaaggattacctacaagaagctatcatgggaaccttacatgaatccttaagaaattctgtgaaacaacgtttgtacaacattccacataacgtaggaattaatcacgaagaatttctaatcaatactgttattgaaacagtaattgatttgagcccaattgcagacgatcaaatagaaaatagctgcatgtattgcaaatctgttttccattgctcaattaactgcaaaaagaaaccaaatagggaacttaggcctgactcgaccaatttctcaaaaacctattatctacaaggtgcacagagacaacaacaacttaagtccagtgcaaaagaacaaaagtcttggaacaagacacaaaaaaagtcaaacaaagtgtacaacagcaaaaaactggtaattattgataccggttccggcgtaaacattaccaatgacaaaaccttactgcataattacgaagacagtaatcgcagtacacgattttttggtattgggaaaaacagttcagtgtctgttaaagggtatggctatataaaaatcaagaatggtcacaacaatactgacaataagtgtttattgacttactatgtaccggaagaagaatccactataatcagctgttatgacttagccaagaaaaccaaaatggttttaagtcgaaaatataccagattgggaaacaaaatcataaaaattaaaaccaagatagttaatggtgtcattcacgtaaaaatgaacgagttaattgaacgtccttccgatgattcaaaaataaatgcaataaaacctacttcttctcctggatttaaactaaataaaaggtctattaccttggaagatgctcataaaagaatgggccatacaggaattcaacaaattgaaaattccataaaacataatcattatgaagaatcccttgacttaatcaaagaaccaaatgaattttggtgtcaaacctgtaaaatctctaaagccacgaaaagaaatcattataccgggtctatgaataatcatagtactgatcatgaaccaggatcatcatggtgcatggatatatttggccctgtatcaagttcaaacgcggacactaaaaggtacatgcttattatggtggataacaacacgagatattgcatgacctccacacacttcaataagaatgctgaaactattttagctcaaatcagaaagaatattcagtacgtggaaacacaatttgacaggaaagtcagagaaattaattcagacagaggtactgaattcacaaatgatcagatagaagaatattttatttcaaaaggaatacatcacatacttacttctacacaagatcatgctgctaatggaagagcagaaagatacatcagaacaatagtaactgatgcaacaacactcctaagacaaagtaacttaagagtaaaattttgggaatacgcagtaacttctgctaccaatataagaaattgcctggaacacaaaagtacaggtaaactaccattgaaggcaatctcacgtcaacctgttacagtgagattaatgtcattcttaccatttggcgaaaaaggaataatttggaatcataatcacaaaaaattgaaaccatctggacttccttctataattctatgcaaagatccaaatagttatggatacaaattctttataccatccaaaaataaaattgtcacatctgataattatacaattcccaactatacgatggacggtagagtaagaaatactcagaatatttacaagagtcatcaattcagttcacataatgataatgaagaagatcaaatcgaaacggtcacaaacttatgtgaagctttggaaaactacgaagatgataataaaccaattactcgcctggaagatttgttcacagaggaagagttatctcaaatagactcaaacgcaaaatacccatctcctagtaataacctagaaggggacttggattacgtattttctgatgttgaggaatctggagattatgacgttgaatctgaactttcaacgacaaatacttcaatctcaactgataaaaacaaaattttgtcaaacaaggattttaattcagaacttgcatcgactgaaatatccatcagtgaaatcgataagaaaggattaataaatacaagtcatattgatgaagataagtatgatgaaaaagtccacagaattccatcgattatacaagagaaactggtaggaagtaaaaatactattaaaatcaatgacgaaaacagaatctccgacagaattcgtagtaaaaatattgggagtatcttaaacactggactcagtagatgtgtagatatcaccgatgaatctattactaacaaagatgagtcaatgcacaacgcaaaacccgaactaattcaggagcagttcaataaaacaaatcatgaaacttcgtttcctaaagaagggagcattggaacaaaatgtaaaattccgaaatacagacaatga

SEQ ID NO: 191168 - DNA, 1459 bp, Saccharomyces pastorianus
atgggcttcaatatagcgtatgtctagctcacagcatgtgttccaaatacattaaagaagatctcttttgttgttgatactaaccagtaaagttgagagttataacaatgaaaataggatgctgtgcgactttttttatccacagttaggtggagtcgaattccatatatatcatttatcgcagaaactaatcgatttgggccattctgtcgtcattataactcacgcttacaaagatcgagtcggcgtacgacatcttaccaacggtctaaaggtctatcacgtaccattttttgtgattttcagagaaaccactttccccactgttttttcaacatttccaataataaggaatattcttctcagagagcagatccaaattgttcattctcatggtagcgcttccacgttcgctcacgagggaattcttcatgctaatactatgggattgagaactgtgttcacggaccattcactctacggttttaataacttaacgtcgatttgggtgaataagttgctaacatttaccttgacaaacatagatcgggttatatgtgtttctaatacatgcaaagaaaatatgattgttagaacagaattaagtcctgatataatctcagtaattcccaacgcagtggtgagcgaagatttcaaaccaagggatcctactggtggcaccaagagaaaacaaagtagggataagatagtgatcgtggtcatcggaaggctctttccaaacaaagggtccgatttacttactcgcataattccgaaagtttgttcctcacatgaagatgtcgaatttatagtagcgggcgatggtccaaagttcatagattttcaacaaatgattgaaagtcatagactacaaaaacgtgtgcaactcttaggctctgttccacatgagaaagtcagggatgtattatgtcaaggtgacatatatttacacgctagtttaacagaagcatttggtacaattctagttgaggccgcatcttgtaatttgctaattgtaacgacacaagtcggaggaattcccgaagtgttaccaaatgagatgactgtttatgcagaacagacatccgtttctgaccttgttcaagcaacaaataaagctatcaatatcataagaagtaaagctttggacacttcctcttttcatgatagcgtgtctaaaatgtacgactggatggacgtagccaaaaggacagtagagatatatactaatatatcttctacttcttccgctgatgataaagattggatgaaaatggtagcaaatctttacaaaagagatggaatctgggctaaacatctttatctgttatgtggaattgtagagtacatgctttttttcctcttagagtggctataccccagggatgaaatcgatctagctccaaaatggcccaagaaaacagtgtctaacgagacgaaggaagcaagagaaacttaa

SEQ ID NO: 191169 - DNA, 1839 bp, Saccharomyces pastorianus
atgtcatttaaggcaactatcaccgagtcggggaagcagaatatctggtttcgtgcgatatatgtgttatctacaattcaggatgatatcaagattacagtgacaacaaatgagttaattgcttggtcaatgaacgagacagatactactctttgtcaggttaggtttcagaaaagcttttttgaggagtatgagtttaaaccacatgagattgtatttggagaaaatggggttcaagttatagaagatacgtacggcaatagtcataagttatactccttccgtgttaatggaagacacctaacaactatatcaagaaagccggatggtgatggcatcaaatcattcacaattgcggtaaacaacacttctacctgtcctgaatcacttgcaaatagattgattgtggtgattgaaatggattcgttaatagtcaaagaatactgtccccaattccagccaataaaatacgatcccataataatcaaccttaagtacaaaaggaggtttttggatgtttttggaactgctgcctccgatcggaatccacaggagcccttggaccctaagctattggacgtttttacaaatacagagcgtgagctaacatcagccttatttaacgaagaagtggaatcagacatacgtaaaaggaatcagttaacggctgctgatgagattaattacatttgttgtaattcaactttattgaagaattttttagacaactgcaatgttaatgtaaccgatgaagtaaaattggaaattaacgtacataggctaagcataactgcattcaccaaggccgtctacggcaaaaataacgaccttttaagaaatgcgttaagcatgagtaacactatcagtacgctcgatcttgagcattattgcttatttacaacaatcgaagatgaaaaacaagataagcgatcacatagtaagcgtagagagcatatgaaaagtataatattcaaattgaaggacttcaaaaacttcataacgataggtccatcctggaagactacccaggacggaaatgataatataagtttatggttttgccacccaggggaccctattcttatgcaaatgcaaaaaccgggcgtaaaattagaattggttgaagttactgacagtaacattaacgatgatattttagaaggaaaattcataaaaacagcaatctctggctccaaagaagaggccggactgaaagacaacaaagaaagctgcgaaagtccattaaaaagcaaaactgctttaaagagagaaaacctgccacactctgtggctggaactcgaaacagtcctttgaaagtgtcgtatctgacccctgataatggaagcacagttgctaagacctatagaaataacacggcaagaaaattattcgtggaagaacaaagccaaagtacgaattacgaacaagataagcggttccggcaggctagttcagttcatatgaacatgaatcgggaacaaagttttgacattggtacgactcatgaagtggcctgtccacgtaatgagagcaattctttaaaaagatccatagcagatatttgtaatgaaactgaagaccccacccaacaatctacatttgcaaaaagggcagacaccactgtgacatggggaaaagcgttaccagctgcagatgatgaggtttcatgcagcaatatcgatagaaaaggaatgctcaagaaagaaaaattgaagcatatgcaaggtctgttgaattcccagaatgacacaagtaatcacaagaaacaggacaataaagagatggaagatgggctgggtctaacacaagtagaaaagccaaggggtatatttgactaa

SEQ ID NO: 191170 - DNA, 414 bp, Saccharomyces pastorianus
atgaagagaaatattatttattatacattgagattattgccacacggaataatgttagttcatagccttaaccaatttattgatgaattcttcacggttaccgaaagaaccaccttggatgaaatgcttgaactttcttgggacaccccaaccaccagatgggttggacaacttgaatggccacaaaaagttgttagcttgcttgaagtgtggaccaacagtgatgatttcgtgaatcaaatcgtcaatggacaagataccatacttacccaagttggcttcgatgatagcattgtcggacaatggaactctttgcttgttgatcttaccgaaacctctcttgtagaccaattgtctaatagtagagtaggatgggtaaccgtaagcaacgtatggttcaatcaacttcaatag

SEQ ID NO: 191171 - DNA, 5269 bp, Saccharomyces pastorianus
atggaatcccaacaattatctcaacattcacccatttctcatggtagcgcctgtgcttcggttacttctaaggaagtccacacaaatcaagatccgttagacgtttcagcttccaaaacagaagaatgtgagaaggcttccactaaggctaactctcaacagacaacaacacctgcttcatcagctgttccagagaacccccatcatgcctctcctcaacctgcttcagtaccacctccacagaatgggccgtacccacagcagtgcatgatgacccaaaaccaagccaatccatctggttggtcattttacggacacccatctatgattccgtatacaccttatcaaatgtcgcctatgtactttccacctgggccacaatcacagtttccgcagtatccatcatcagttggaacgcctctgagcactccatcacctgagtcaggtaatacatttactgattcatcctcagcggactctgatatgacatccactaaaaaatatgtcagaccaccaccaatgttaacctcacctaatgactttccaaattgggttaaaacatacatcaaatttttacaaaactcgaatctcggtggtattattccgacagtaaacggaaaacccgtacgtcagatcactgatgatgaactcaccttcttgtataacacttttcaaatatttgctccctctcaattcctacctacctgggtcaaagacatcctatccgttgattatacggatatcatgaaaattctttccaaaagtattgaaaaaatgcaatctgatacccaagaggcaaacgacattgtgaccctggcaaatttgcaatataatggcagtacacctgcagatgcatttgaaacaaaagtcacaaacattatcgacagactgaacaataatggcattcatatcaataacaaggtcgcatgccaattaattatgagaggtctatctggcgaatataaatttttacgctacacacgtcatcgacatctaaatatgacagtcgctgaactgttcttagatatccatgctatttatgaagaacaacagggatcgagaaacagcaaacctaattacaggagaaatctgagtgatgagaagaatgattctcgcagctatacgaatacaaccaaacccaaagttatagctcggaatcctcaaaaaacaaataattcgaaatcgaaaacagccagggctcacaatgtatccacatctaataactctcccagcacggacaacgattccatcagtaaatcaactactgaaccgattcaattgaacaataagcacgaccttcaccttaggccaggaacttactgaatctacggtaaatcacactaatcattctgatgatgaactccctggacacctccttctcgattcaggagcatcacgaacccttataagatctgctcatcacatacactcagcatcatctaatcctgacataaacgtagttgatgctcaaaaaagaaatataccaattaacgctattggtgacctacaatttcacttccaggacaacaccaaaacatcaataaaggtattgcacactcctaacatagcctatgacttactcagtttgaatgaattggctgcagtagatatcacagcatgctttaccaaaaacgtcttagaacgatctgacggcactgtacttgcacctatcgtaaaatatggagacttttactgggtatctaaaaagtacttgcttccatcaaatatctccgtacccaccatcaataatgtccatacaagtgaaagtacacgcaaatatccttatcctttcattcatcgaatgcttgcgcatgccaatgcacagacaattcgatactcacttaaaaataacaccatcacgtattttaacgaatcagatgtcgactggtctagtgctattgactatcaatgtcctgattgtttaatcggcaaaagcaccaaacacagacatatcaaaggttcacgactaaaataccaaaattcatacgaaccctttcaatacctacatactgacatatttggtccagttcacaacctaccaaatagtgcaccatcctatttcatctcatttactgatgagacaacaaaattccgttgggtttatccattacacgaccgtcgcgaggactctatcctcgatgtttttactacgatactagcttttattaagaaccagtttcaggccagtgtcttggttatacaaatggaccgtggttctgagtatactaacagaactctccataaattccttgaaaaaaatggtataactccatgctatacaaccacagcggattcccgagcacatggagtcgctgaacggctcaaccgtaccttattagatgactgccgtactcaactgcaatgtagtggtttaccgaaccatttatggttctctgcaatcgaattttctactattgtgagaaattcactagcttcacctaaaagcaaaaaatctgcaagacaacatgctggcttggcaggacttgatatcagtactttgttacctttcggtcaacctgttatcgtcaatgatcacaaccctaactccaaaatacatcctcgtggcatcccaggctacgctctacatccgtctcgaaactcttatggatatatcatctatcttccatccttaaagaagacagtagatacaactaactatgttattcttcagggcaaggaatccagattagatcaattcaattacgacgcactcactttcgatgaagacttaaaccgtttaactgcttcatatcattcgttcattgcgtcaaatgagatccaagaatccaatgatcttaacatagaatctgaccatgacttccaatccgacattgaactacatcctgagcaaccgagaaatgtcctttcaaaagctgtgagtccaaccgattccacacctccgtcaactcatactgaagattcgaaacgtgtttctaaaaccaatattcgcgcacccagagaagttgaccccaacatatctgaatctaatattcttccatcaaagaagagatctagcaccccccaaatttccaatatcgagagtaccggttcgggtggtatgcataaattaaatgttcctttacttgctcccatgtcccaatctaacacacatgagtcgtcgcacgccagtaaatctaaagatttcagacactcagactcgtacagtgaaaatgagactaatcatacaaacgtaccaatatccagtacgggtggtaccaacaacaaaactgttccgcagataagtgaccaagagactgagaaaaggattatacaccgttcaccttcaatcgatgcttctccaccggaaaataattcatcgcacaatattgttcctatcaaaacgccaactactgtttctgaacagaataccgaggaatctatcatcgctgatctcccactccctgatctacctccagaatctcctaccgaattccctgacccatttaaagaactcccaccgataaattctcgtcaaactaattccagtttgggtggtattggtgactctaatgcctatactactatcaacagtaagaaaagatcattagaagataatgaaactgaaattaaggtatcacgagacacatggaatactaagaatatgcgtagtttagaacctccgagatcgaagaaacgaattcacctgattgcagctgtaaaagcagtaaaatcaatcaaaccaatacggacaaccttacgatacgatgaggcaatcacctataataaagatattaaagaaaaagaaaaatatatcgaggcataccacaaagaagtcaatcaactgttgaagatgaaaacttgggacactgacgaatattatgacagaaaagaaatagaccctaaaagagtaataaactcaatgtttatcttcaacaagaaacgtgacggtactcataaagctagatttgttgcaagaggtgatattcagcatcctgacacttacgactcaggcatgcaatccaataccgtacatcactatgcattaatgacatccctgtcacttgcattagacaataactactatattacacaattagacatatcttcggcatatttgtatgcagacatcaaagaagaattatacataagacctccaccacatttaggaatgaatgataagttgatacgtttgaagaaatcactttatggattgaaacaaagtggagcgaactggtacgaaactatcaaatcatacctgataaaacagtgtggtatggaagaagttcgtggatggtcatgcgtatttaagaatagtcaagtaacaatatgtttatttgttgacgacatgattttattcagcaaagacttaaatgcaaataagaaaatcataacaacactcaagaaacaatacgatacaaagataataaatctgggtgaaagtgataacgaaattcagtacgacatacttggcttagaaatcaaatatcaaagaggtaaatacatgaaattaggtatggaaaactcattaactgagaaaatacccaaattaaacgtacctttgaatccaaaaggaagaaaacttagcgctccaggtcaaccaggtctttatatagaccaggatgaactagaaatagatgaagatgaatacaaagagaaggtacatgaaatgcaaaagttgattggtctagcttcatatgttggatataaatttagatttgacttactatactacatcaacacacttgctcaacatatactattcccctctaggcaagttttagacatgacatatgagttgatacaattcatgtgggacactagagataaacaactgatatggcacaaaaacaaacctaccgagccagataataaactagtcgcaataagtgatgcttcgtatggcaaccaaccgtattataaatcacaaattggcaacatatatttacttaatggaaaggtaattggaggaaagtccaccaaggcttcattaacatgtacttcaactacggaagcagaaatacacgcgataagtgaatctgtcccattattaaataatctaagttacctgatacaagaacttaacaagaaaccaattattaaaggcttacttactgatagtagatcaacgatcagtataattaagtctacaaatgaagagaaatttagaaacagattttttggcacaaaggcaatgagacttagagatgaagtatcaggtaataatttatacgtatactacatcgagaccaagaagaacattgctgatgtgatgacaaaacctcttccgataaaaacatttaaactattaactaacaaatggattcattag

SEQ ID NO: 191172 - DNA, 198 bp, Saccharomyces pastorianus
atgaaggctataatattaggtatacagaatatactagaagttctcctcgaggatataggaatcctcaaaatggaatctatatttctacatactaatattacgaatattcctcattccgttttatatgtttcattatcctattacattatcaatccttgcacttcagcttcctctaacctcgatgacagcttctcataa

SEQ ID NO: 191173 - DNA, 2085 bp, Saccharomyces pastorianus
atggtcttgataaatggcataaagtatgcctgtgagaggtgcataagaggccatagagtaacaacatgcaatcatacagatcaaccgcttatgatgatcaaacccaaaggtagaccttccactacatgcgactattgtaaacaacttcgaaaaaacaagaatgcaaatcctgaaggtgtttgcacgtgtggccggctagagaagaaaaaactggcacagaaagccaaagaagaagcaagagctaaagccaaagaaaaacaaagaaaacagtgtacctgcgggactgatgaggtttgcaaatatcatgctcaaaagagacatctaagaaagtccccttcaagttctcaaaagaaaggaagatccatttctcgttctcaaccaatgtttgaaagggtattgtcttctacttcacttgacagcaatatgttatccggccacggagcactatcagatacctctagcatactgacgagcacatttttagacagtgagccgggtgttggtaaaatttcaaaagattaccatcatgtcccttcattggcctccatttcatccttacaatcctcgcaatcgttagatcaaaatttcagtataccacaaagcccgccgttatcttcaatgtcatttaattttctcacgggaaatatcaatgaaaccaaccaaaatcacagtaatcatcagcattcaaaatcaggcaataactggcaagatagttcggtaagcttgccagcgaaagctgattcacgtcttaacatgatggataaaaacaactctgtgggtcttgacctattaggccattcaaaacgaatatcgccgatatcaaactctcgtgtgggcgaagttagcgttccgctagaagaatatattccttctgacattgatggggttggaagagttactgataaaagctctttggtctacgattggccatttgatgaaagtattgagagaaatttcagtacaaccgcaaccgctgcaactggtgaaagtaagttcgacattaacgacaactgtaatagaattaatagcaaaagttatagtaagactaatagtatgaatggaaacggtatgaacaatagcaataataataatatcaacagtaatggcaacgacaagaacaataacaactcttctagacaagaacatcaaggaaatggactatttgacatgtttacagattcatcgtcgatttcaacgctttcccgtgcaaacttattattgcaagaaaaaattggttcgcaagaaaactctgtcaaacaagaaaactattcgaaaaatcctcaacttcgtcatcaattaacttccagaagtagatcatttattcatcatccggcaaacgagtatttgaagaatacttttggaaattcacatagtaatgacatcggaaagggagttgaagtgctatctttgacaccgagttttatggatattcccgaaaaagaaagagaaacggaaagatcgccatcatccaattacattactgacagacctttcactcgaaaacctagatcttctagcattgacgtaaaccataggtatccacctatggcaccaacaaccgtagcgacatctcccggtgcattgaacaatgccgtagcaagcaatctcgacgatcaactgagtttaacatcactaaactctcagccatcatcgatagcaaatatgatgatggacccttcaaacctagctgagcaaagttctattcattcagttcctcagtcaataaactctccgagaatgcctaaaactggaagtcgccaagacaagaacattcacactaagaaggaagaaagaaatccgctaaataacatacacgatctgtcacaattggaaaatgtaccagacgagatgaaccaaatgttctccccaccattaaaaagtatgaatagaccggatgccataagggaaaattcatctagtagtaatttcataatccaaggaaatagcatgatctctacgccttccggaaggaatgaccttccagatacctctccaatgagtagtattcaaacagcgtcaccaccaagtcaattactgaccgatcaaggatttgcggatttggataatttcatgtcttcgttatga

SEQ ID NO: 191174 - DNA, 330 bp, Saccharomyces pastorianus
atgtcttgcattttttccgctgacttgggagtagagtacagctgcgcggagtcgcgtattacaaatcttgtactttgcattctgtgcatacgtgaggaaaaagcagcacctgttgtgaaaaaagataaatttctttttttcatttttctatcctcaaaggaaaatcttttctgcgaaatttctagccgctcttcagtttccgaagtaaagtcgctgagggcgaaaaacaactttatttgcccacacgctgttataggcttccagggagcaaaagcgcaattgggaataaggtttcctcaattgaatggtttgcttcgcctacagcattaa

SEQ ID NO: 191175 - DNA, 676 bp, Saccharomyces pastorianus
atgtccgaatatgcatctagtattcactctcaaatgaaacaattcgataccgtatgtaagatggttttattggttccatcgtcatcatggttcaaacagccaaatgacccgacacacgtaaccgaagcagttatactaacaagaaagctaattttcaccctccttgctacatttttttctacagaagtactctggtaatagaattttacagcaattagaaaataaaactaatttgcctaaatcttatttagttgctggtttaggtttcgcttatctccttttgatttttattaacgtcggaggtgtaggtgaaattctttccaattttgctgggtttgtgttgccagcatatttatcgttggttgctttgaagacaccaacgtccaccgatgacacacaactcttgacctactggattgtcttttcatttttgagtgtcattgaattctggtccaaggcaattctatatttgattccattctactggtttttgaaaaccgttttcttaatctacattgccttgcctcaaactggtggcgctagaatgatctatcaaaagatcgtagccccattgaccgacagatatatcctaagagatgttagcaagacagaaaaggatgaaattagagcttccgtcaatgaggcttctaaggctacaggtgcttctgttcattaa

SEQ ID NO: 191176 - DNA, 682 bp, Saccharomyces pastorianus
atgtatgatatattacgcacacgatttaccgtttgcttggaggagtagtgtttcgtgatgaaatagactgatatagacagaattccacagacttttacgatataaagggaaaaacatgaagttgaacaccatatctcaaatgaataggatcactgtaattcgatagggtacaattatgtgaaatgtctgctttatgggaactttcattcatatacctgaaggtggcaaactagtcttacgaaactgttcagtgcagagatagaattttgtggagatgcatatagggaaacaaagtggaatttatgcttgtataatcaccaattcgaaacactaaacctcgacctatttagaatttccttcaagatttactaacatattttgatattttttcttttttgaatacagggctaaaagaactaagaaggttggtatcactggtaagtacggtgtccgttatggttcctctttgagaagacaagtcaagaagttggaaatccaacaacacgctagatacgattgttctttctgtggtaagaagaccgtcaagagaggtgctgctggtatttggacttgttcctgttgtaagaagaccgtcgctggtggtgcttacactgtctccactgctgctgccgccaccgttagatctaccatcagaagattgagagaaatggttgaagcttga

SEQ ID NO: 191177 - DNA, 1872 bp, Saccharomyces pastorianus
atgtcatcgagcaagaaaatcgtcatcctctatggatcggagacaggtaacgcgcatgattttgctacaatcttatcccatcgactacatcgctggcatttctcccatacattttgctccattggtgattatgacccacaggatatcttgaaatgcaggtacctttttattatatgctccacaacaggccaaggtgaattaccaaggaatgtcaatgcattaaaaggtgaaagacccgtcacgttctggtcgtttttaaagagaaagaatcttccgtcgaatttgctcaaccatattcaaactgccatgcttggacttggtgattcatcttatcctaagtttaactacggcattagaaagctacatcagcgcattgtcacacaattgggtgctaatgaattattcgatagattggaggctgacgaccaggctatggctggtagcaataagggtacaggtctcggaattgaatcagtatattttgaatatgaaaagaaagtcctaagctttcttttaagtaagtaccccaacagaaaggtcaatggccaaataattaagagggaagaattggaccctgaggtttacctagagccagcatcctacctacagctttcagacgaacatgccaatgaaaagttcactagcaccaaggttatattcgaaggtgatgaatcgttaaaggttggcagagttaatataaacaaaaggattacatctgaaggtcatttccaagacgtgaggcagttcaagtttagtaatgtggacaagattcaagaaaactatgaacccggtgatacagtaaccatatatccttgcaatacagatgaggatgtttcaagattcctagcaaatcaaagccattggttagaaattgcggacaaaccattgaatttcaccagtggagttcctaatgatcttaaggatggtggattagttcgcccgatgactttaaggaacttgttgaaatatcactgtgatttcatgagcattcctagaacaagttttttcttgaagatttggacctttgcaactgatgtaactaagatggaacgtggccaagaacaactgaatgatcaaagagaaaaattgcgccaatttgctactgatcaagatatgcaggacttatatgactactgtaatagacccagaaggtcaattcttgaagtactggaagattttatctccgtaaagttgccctggaaatatgtgctagattacttgcccatcattaaaccaaggtactactctatatctagcggccctggggatcctaatattgaattaacagttgcgatagtaaaatataaaactatcttaaggaaaattcgaagaggaatttgcactaactacattgcacgattgcaagagggggaacagataaggtataagttacaaaataatcacataatcaaaaaggaatttttgaataaacctatgattcttgtcggaccgggtgtcggtctagcaccattattatcagtggttaaagcggagatatctaaagatatcaaactcctcttcggttgtagatataaagataaagattatatttataaagatatgctggaagattggttccgtaagggcaaaattgccttacattcatccttttccagagatgaggaaaattcaccaggtgttaaatatgtccaagactacttatggagattaggtgaggaaataactaatttggtagttaataaagacgccgtttttttcttatgtggctcatcaggtaaaatgcctatccaagtcagattaacattcattgaaatgttaaaaaaatggggcaattttagtgatgaagaaactgccaaaaaatacctgaaagaaatggaaaaatctgatagatatatccaggaaacttggtag

SEQ ID NO: 191178 - DNA, 321 bp, Saccharomyces pastorianus
atgcatacatacatatatatatatactgtgtatattcaaatggtggcctttagcccataccgaattgttttgccatttgttgcatttgtggatcttgcatcattttcatcatttcgttcatatcaggcattcctccgcccattcctccgcccattccgccaccaaacatgttcatcatattttgcattagacctggattttgcttcagcttttgttgtgcctgctgcatcatttgtggagtcacttttggcataccaggcatattcggcataccaggcatgtttggcatacccggcatgtttggcatgccaggcatcctag

SEQ ID NO: 191179 - DNA, 324 bp, Saccharomyces pastorianus
atgtcccgccatcagtttgatctaataatgtgcctaaagcagcctggtgtacagacaggtcttctttgtgaaaaatgtgatggcaaatgtcctatctgcgactcttatgtaaggcccaaaaggaaagttagagtatgtgaaaactgttcgtttggtaaacaagctaaaaattgtataatttgtaatctaaatgttggagtcaatgacgcattctattgttgggagtgctgccgcttaggtaaagataaagatggctgtcctaggatcttaaaccttggcagcaatagactggatagacatttcgagaaaaagaaaaaggtataa

SEQ ID NO: 191180 - DNA, 1290 bp, Saccharomyces pastorianus
atggtagacgtggaagagaaaagtcaagaagttgaatatgttgatccaacggtgaatagggtgcccaattatgaggtatctgaaaaggcgtttcttttgacacaatcaaaggttagtattgaacagcgtaaggaagcggcagagttcgttttagccaaaattaaagaggaagaaatggccccttattataaatatctttgcgaggaataccttgttaataatggccaatctgacttggaacacgatgaaaagtcagattctttaaacgaatggatcaaatttgaccaggagctatacaatgaattgtgcaaaaaaaatgaaagtaagattaaagagttaaatgaaaagatccaaaaattggaagaagatgatgaaggtgaactagaacaagctcaagcctggattaatctgggtgaatattatgcacaaatcggtgacaaagataatgctgaaaagacgctagggaaatcattatcgaaggctatttccacaggcgccaaaattgatgttatgctaacaattgcaaggctggggttcttttataacgaccaactttatgttaaggagaagttggaagcagtcaattctatgattgaaaaaggtggtgactgggagagaagaaatagatataaaacatactatggtatccactgcttggccgtaagaaactttaaggaagcggcaaagttattggtcgattctctagcaactttcacctctattgaattaacttcctatgaaagcattgccacatatgcatcggtcacaggtttattcactctggaaagaacagacctaaaatccaaagtcatcgattcacctgaattgttatctttaatctcaacaactgccgcactacaatctatctcgtcgttaacaatttccctttacgcgtccgattatgccagttactttccatatcttttggaaacatatgcaaatgttttgattccatgtaaatatttgaatagacatgcagatttctttgttagagaaatgagaagaaaagtctacgcacaattgttggaatcatataagactttgtcgctgaaatctatggcaagcgcatttggtgtttcggttgcgttcttggataacgacctgggtaagtttattccaaataagcaactaaattgtgtcattgatagagttaatgggatcgtagagaccaacaggccagacaacaaaaatgctcaataccatctgctagttaagcaaggtgacggtttgctaacaaaattacaaaaatacggtgcagcagtgagattgacagggtcagatcgtgtttga

SEQ ID NO: 191181 - DNA, 5269 bp, Saccharomyces pastorianus
atggaatcccaacaattatctcaacattcacccatttctcatggtagcgcctgtgcttcggttacttctaaggaagtccacacaaatcaagatccgttagacgtttcagcttccaaaacagaagaatgtgagaaggcttccactaaggctaactctcaacagacaacaacacctgcttcatcagctgttccagagaacccccatcatgcctctcctcaaactgctcagtcacattcaccacagaatgggccgtacccacagcagtgcatgatgacccaaaaccaagccaatccatctggttggtcattttacggacacccatctatgattccgtatacaccttatcaaatgtcgcctatgtactttccacctgggccacaatcacagtttccgcagtatccatcatcagttggaacgcctctgagcactccatcacctgagtcaggtaatacatttactgattcatcctcagcggactctgatatgacatccactaaaaaatatgtcagaccaccaccaatgttaacctcacctaatgactttccaaattgggttaaaacatacatcaaatttttacaaaactcgaatctcggtggtattattccgacagtaaacggaaaacccgtacgtcagatcactgatgatgaactcaccttcttgtataacacttttcaaatatttgctccctctcaattcctacctacctgggtcaaagacatcctatccgttgattatacggatatcatgaaaattctttccaaaagtattgaaaaaatgcaatctgatacccaagaggcaaacgacattgtgaccctggcaaatttgcaatataatggcagtacacctgcagatgcatttgaaacaaaagtcacaaacattatcgacagactgaacaataatggcattcatatcaataacaaggtcgcatgccaattaattatgagaggtctatctggcgaatataaatttttacgctacacacgtcatcgacatctaaatatgacagtcgctgaactgttcttagatatccatgctatttatgaagaacaacagggatcgagaaacagtaaacctaattacaggagaaatccgagtgatgagaagaatgattctcgcagctatacgaatacaaccaaacccaaagttatagctcggaatcctcaaaaaacaaataattcgaaatcgaaaacagccagggctcacaatgtatccacatctaataactctcccagcacggacaacgattccatcagtaaatcaactactgaaccgattcaattgaacaataagcacgaccttcatcttaggccagaaacttactgaatctacagtaaatcatactaatcattctgatgatgaactccctggacacctccttctcgattcaggagcatcacgaacccttataagatctgctcatcacatacactcagcatcatctaatcctgacataaacgtagttgatgctcaaaaaagaaatataccaattaacgctattggtgacctacaatttcacttccaggacaacaccaaaacatcaataaaggtattgcacactcctaacatagcctatgacttactcagtttgaatgaattggctgcagtagatatcacagcatgctttaccaaaaacgtcttagaacggtctgacggcactgtacttgcacctatcgtaaaatatggagacttttactgggtatctaaaaagtacttgcttccatcaaatatctccgtacccaccatcaataatgtccatacaagtgaaagtacacgcaaatatccttatcctttcattcatcgaatgcttgcgcatgccaatgcacagacaattcgatactcacttaaaaataacaccatcacgtattttaacgaatcagatgtcgactggtctagtgctattgactatcaatgtcctgattgtttaatcggcaaaagcaccaaacacagacatatcaaaggttcacgactaaaataccaaaattcatacgaaccctttcaatacctacatactgacatatttggtccagttcacaacctaccaaaaagtgcaccatcctatttcatctcatttactgatgagacaacaaaattccgttgggtttatccattacacgaccgtcgcgaggactctatcctcgatgtttttactacgatactagcttttattaaaaaccagtttcaggccagtgtcttggttatacaaatggaccgtggttctgagtatactaacagaactctccataaattccttgaaaaaaatggtataactccatgctatacaaccacagcggattcccgagcacatggagtcgctgaacggctaaaccgtaccttattagatgactgccgtactcaactgcaatgtagtggtttaccgaaccatttatggttctctgcaatcgaattttctactattgtgagaaattcactagcttcacctaaaagcaaaaaatctgcaagacaacatgctggcttggcaggacttgatatcagtactttgttacctttcggtcaacctgttatcgtcaatgatcacaaccctaactccaaaatacatcctcgtggcatcccaggctacgctctacatccgtctcgaaactcttatggatatatcatctatcttccatccttaaagaagacagtagatacaactaactatgttattcttcagggcaaggaatccagattagatcaattcaattacgacgcactcactttcgatgaagacttaaaccgtttaactgcttcatatcattcgttcattgcgtcaaatgagatccaagaatccaatgatcttaacatagaatctgaccatgacttccaatccgacattgaactacatcctgagcaaccgagaaatgtcctttcaaaagctgtgagtccaaccgattccacacctccgtcaactcatactgaagattcgaaacgtgtttctaaaaccaatattcgcgcacccagagaagttgaccccaacatatctgaatctaatattcttccatcaaagaagagatctagcaccccccaaatttccaatatcgagagtaccggttcgggtggtatgcataaattaaatgttcctttacttgctcccatgtcccaatctaacacacatgagtcgtcgcacgccagtaaatctaaagatttcagacactcagactcgtacagtgaaaatgagactaatcatacaaacgtaccaatatccagtacgggtggtaccaacaacaaaactgttccgcagataagtgaccaagagactgagaaaaggattatacaccgttcaccttcaatcgatgcttctccaccggaaaataattcatcgcacaatattgttcctatcaaaacgccaactactgtttctgaacagaataccgaggaatctatcatcgctgatctcccactccctgatctacctccagaatctcctaccgaattccctgacccatttaaagaactcccaccgataaattctcatcaaactaattccagtttgggtggtattggtgactctaatgcctatactactatcaacagtaagaaaagatcattagaagataatgaaactgaaattaaggtatcacgagacacatggaatactaagaatatgcgtagtttagaacctccgagatcgaagaaacgaattcacctgattgcagctgtaaaagcagtaaaatcaatcaaaccaatacggacaaccttacgatacgatgaggcaatcacctataataaagatattaaagaaaaagaaaaatatatcgaggcataccacaaagaagtcaaccaactattgaaaatgaatacttgggacactgacaaatattatgacagaaaagaaatagaccctaaaagagtaataaactcaatgtttatcttcaacaagaaacgtgacggaactcataaagctagatttgttgcaagaggtgacattcagcatcctgatacgtacgatacaggtatgcaatccaacactgtacatcattatgcgttgatgacatccctgtcacttgcattagacaataactactatattacacaattagacatatcttcggcatatttgtatgcagacatcaaagaagaattatacataagacctccaccacatttaggaatgaatgataagttgatacgtttgaagaaatcacattatggattgaaacaaagtggagcgaactggtacgaaactatcaaatcatacctgataaaacagtgtggtatggaagaagttcgtggatggtcatgcgtatttaagaatagtcaagtaacaatttgcttattcgttgatgatatgatattgttcagcaaagacttaaatgcaaataagaaaatcataacaacactcaagaaacaatacgatacaaagataataaatctgggtgaaagtgataacgaaattcagtacgacatacttggcttagaaatcaaatatcaaagaggtaaatacatgaaattaggtatggaaaactcattaactgagaaaatacccaaattaaacgtacctttgaatccaaaaggaagaaaacttagcgctccaggtcaaccaggtctttatatagaccaggatgaactagaaatagatgaagatgaatacaaagagaaggtacatgaaatgcaaaagttgattggtctagcttcatatgttggatataaatttagatttgacttactatactacatcaacacacttgctcaacatatactattcccctctaggcaagttttagacatgacatatgagttaatacaattcatgtgggacactagagataaacaactgatatggcacaaaaacaaacctaccgagccagataataaactagtcgcaataagcgatgcttcatatggtaaccaaccatattacaagtcacaaattggtaacattttcctactcaacggaaaagtgattggaggaaagtcgacaaaggcttcgttaacatgcacttcaactacagaagcagaaatacacgcagtcagtgaagctattccgctattgaataacctcagtcaccttgtgcaagaacttaacaagaaaccaattattaaaggcttacttactgatagtagatcaacgatcagtataattaagtctacaaatgaagagaaatttagaaacagattttttggcacaaaggcaatgagacttagagatgaagtatcaggtaataatctatacgtatactacatcgagaccaagaagaacattgctgatgtgatgacaaaacctcttccgataaaaacatttaaactattaactaacaaatggattcattag

SEQ ID NO: 191182 - DNA, 1974 bp, Saccharomyces pastorianus
atgagtgataatggttcccccgcggttcttccaaaaaccgaatttaataaatacaaaatcggcaaagtgaagagtacaccagccatccagcgagatgcgaagactaacttaacatacatcaaactaagaaaaagaagtagtgagaaagtttacgggtgtacagttttccagaatcattatcgtgaggatgaaaaattaggacaaggaacatttggtgaggtttataagggaattcatttagagactcaaagacaagtggcaatgaaaaaaattatagttagcgttgaaaaagatctgtttcctataactgcacaacgagaaattactattttaaagcgtttaaaccacaaaaatattattaaactaatcgaaatggtgtatgaccattcaccggatattacaaatgcggcatccagcaacctacataagtcattctacatgatcctgccgtatatggtagcagatctgtcgggcgttttgcataatccgagaatcaacttagagatgtgcgatataaagaatatgatgctacaaatattagaaggcctaaattatattcattgtgcaaaattcatgcatagggatataaagacagcaaatattttgattgaccacaacggtgttttaaagcttgctgattttggtttagcaagattatattatggctgtcctccaaacttaaagtatcctggtggtgcaggttccggcgccaaatatacatcagtagtcgtaacgagatggtatagagcacctgagttggtgcttggtgataaacagtatacaacagctgttgatatatggggtgtcggatgcgttttcgcagaattttttgagaaaaaacctattttacagggaaaaacggatattgatcagggacatgttattttcaaactacttggtacaccgacagaagaagattgggccgtggctagatatttgccaggtgctgaactaacaacaactaattacaagccaacgttgagggaaagatttggtaaatatctaagtgaaacaggtctagattttttaggacagttgttagcgttagatccttacaagaggttgaccgctatgtctgctaaacaccatccttggtttaaagaggaccctttaccatcagagaagataacattaccgacggaagaaagtcatgaagctgatattaagaggtacaaggaagaaatgcaccaatcattgtcccaaagagtacctactgcgccaagaggtcatatagttgaaaagggtgaatcacctgtcgtgaaaaatcttggggcgatcccaagaggccccaagaaagatgacgcaagttttttgcctccatcaaagaacgtattggctaagccgcctccttcgaaaataagagaactacatcaaaatcctagaccgtatcatgtgaacagcggatatgctaaaactgcgattccaccgccagcagcccctgcaggagttaatagatacggacccaacaatagttccagaaataatcgcttcagcggcaacagcactgcacccaacaacagcaggaatcccgtaaatcgatttcatcctgagacaaatgtcagctctaaatataataaagtacctttgccattggggcctcagtcaagataccagggtaattcaaatgagtcccggtacaaaaactcgccaaatgactctagatatcataaccctaggtacgtgaacaagccggaaaccaacttcaataggcaaccacagaaatatagtcgccaagaatccaatgcgccaatcaataaaaattataatccttcaaacggttctcgcaatatggctggtgatcatcatcaaggctcgagaccttctcatccacaattcccaatctcgccctcacaggggcagcatcagcttacgagtaaaccaatagagaaaaaaaatggaagctttaaggatgaaagagcgaaaccagatgagtctaaggagttccaaaatagtgatattgcagatctatattag

SEQ ID NO: 191183 - DNA, 1590 bp, Saccharomyces pastorianus
atgactataagcgaagctcgtctatcaccgcaagtcaatcttctcccaataaagaggcactcaaacgaagaggtagaggagactgcagcgattctaaaaaagcgtactatagataatgaaaagtgtaaagacagcgaccctggttttggttcccttcaaagaaggttactgcagcaactttatggcacacttcctacggacgaaaagataatcttcacatatttacaagattgtcaacaagagatcgatagaatcattaaacaatccattattcagaaagagagtcattcagtaattctcgtggggcccagacaaagttacaaaacatacttattagactatgaactgtctttgttgcaacaatcttataaagagcagtttataactatcaggttgaatgggtttattcactccgaacaaacagctattaacggtatagcaactcaattggaacagcagttgcagaaaattcatggcagtgaagaaaaaattgacgatacttcattagagactattagcagtggttctttgacagaagtgtttgagaaaattcttttactcttagattcgaccacgaagacaagaaatgaagatagtggtgaggttgacagagagagtataacaaagataacagttgtttttatattcgatgaaattgatacatttgctgggcctgtgaggcaaactttattatacaatctttttgacatggtagaacattctcgggtacctgtttgcatttttggctgcacaacgaaattaaatatcttggaatatttagaaaagagggtaaagagtagattttctcaaagagtgatttatatgccgcaaatacagaatctagacgatatggttgacgccgtcagaaatttacttacagttcgctctgaaatctccccctgggtttcacaatggaatgaaacgttggaaaaagaactatccgaccctcgatcgaatttgaatagacatattaggatgaatttcgaaacctttaggtcattacctacattgaaaaatagcataattccattagtagcgacatccaaaaattttggttcactctgcactgccataaaatcgtgttcttttcttgacatatacaataagaaccaactatctaataatttaacaggaaggctccaatctttatccgatttagagttagccattttgatctcagccgctagggttgccttaagggcgaaagacggatcttttaattttaatttagcttatgcagagtatgaaaagatgattaaagctatcaactccagaattcccaccgtggctcctactacaaatgtgggaacaggtcaaagtactttttctatcgacaatactatcaaactatggttgaaaaaggacgtcaagaacgtttgggaaaatttagtgcaactggatttttttaccgagaaatcagccgttggtttgagagataatgcgaccgcagcattttacgctagcaattatcaatttcagggcaccatgatcccgtttgacttgagaagttaccagatgcagatcattcttcaggaattaagaagaattatccccaaatctaatatgtactactcctggacacaactgtga

SEQ ID NO: 191184 - DNA, 1311 bp, Saccharomyces pastorianus
atggctccaccaaagaaaaccgtaaagaagatggaccttacgtcatttttaaatgatgacacctttggttcatcttgggctgaagaagatgtcgatttgaataagatcacaattcctattgaaaccgctaatgcaaacactattccattgtccgaattggctcatgctaaaaacaacagcaataacacgcgttcaggcggctttggtggcagttttggaggtagatctagattagaccctgctttggggggcggttcttccgatagaagagaggaataccctgttccagatgctccaccatatagggctgtcataaacaacattccatgggatattaccccagagggtgttcaagcctgggttgaagatggtttagttaagcctgaagcggttgaagaagttgttttgccaaagaatctaagagacccaacaagattaaagggtaatgctttcgttactttgaaagaaagagcagatttggtcgccgttctgaagttcaacggtactaaattgaatgagagaactgtttacgtttctgttgcggctccaagaagagggggaggtgcagatgttgattggagtagtgctagaggctccaatttccaaggtgatggaagagaagatgcaccagatcttgattggggtgccgctagaggttctaacttcagaggtccaagaagagaaagagaagaagttgatattgactggactgctgcaagaggttccaatttccaaggctcttccagaccaccaagaagagaaagagaagaagttgatatcgactggagcgctgcaagaggctccaatttccaaggctcttccagaccaccaagaagagaaagagaagagccagatattgactggagtgcagctagaggctctaactttcaaagctcctcgaggccaccaagaagagaaagagaagagccagatattgactggagtgcagccagaggttccaacttccaaagctcctcaagaccaccaagaagagaaagagaaaaggaagaaccagctttggattggggtgctgccagaggtgctcagtttggtaagcctcaacaaaccaaaaatacctacaaggataggtctctaactaacaaaaagactactgatgagcaaccaaaaatccagaagtctgtttatgatgttttacgtactgaagatgatgatgaagatgaagaggctgaaaagcaaaatggagacgcaaaagaaaacaaagttgatgcggcagttgaaaagctacaggataaaactgctcaattgactgttgaagatggtgacaattgggaagttgttggtaagaaatag

SEQ ID NO: 191185 - DNA, 4224 bp, Saccharomyces pastorianus
atgctaggtttgcgaactcatggtttagacaggtatgaacattatattcgtcgcccgtcggattttggcaaacttgagctgcaagattggttgaatcataagtcattccgagtttcccccaatttattaattgattcaagcaccacacgtgagtggaatgaacctgagcttttttatcaaaataccgaggatgaaacttgggtgagaccttgtgtagggccaaagctagaaccatcaatgatgatgctcagatatcacgattcgaatattggtcaaatgcctcaattttgttatccaatctcaagtccgataaattttaaaccagtattaaaatacattttgcaagaacgttctgaactgtcagacggcttccctcaaaagtataacacactaataggtagtctttttgacattgataaaaacccagaaaccttagatgattcagatatagaagcattggatgacatagaaatgagcagtgacagcggtaatgttaaagaaccaaaaattgaattgcaggcgctggaagaaatccaacaaaagcatttcagtttaatagtatccaacaatggaatctttcaaacaggtagcacttcaataacatacatacagtctggcatatctggcagcatagctataaaacccaacaacgttgcaattttaatattactcactcaaccaagtggtcacttattgtctattttaccgcttgatgacggtaaagagacatatttgctacaatattggaacctgggacaaaaaggtcagtggaacataatcaagcaccaaaacgagaagcagtttgttcttatacataaggaactaggcatttgcaaattttttgaattccatttaccatttacttttcaattagtaaacaatttaacattgaccgattccgtgattatgaacggatcctttttcccaacaaattacactgatttagatccctatttcattatatttataacagccataagatatgaaaggatagtctactttgtcatagaatggaacaacaacgaaataaagaaaaaagaggtatatcaattgacagtatttgatggtgagaagactaatatgacaatacccattggactaaatgcatgtttagtcgaaacacccctaaagttctctttagtttctgcaaatcaaattatgtcaggagagactgaattccactcattccaattgaaggctctcaagggaatcaagtcattttttccagctcctttattgttattaaaattacaagaactacacccacatacatttaaaaaattccaatattgtaccataatatcctcctcgacaggaaatatttgtttttgcgtcaccgaacgatcgacaatagtaaatggtaatttaaaattttacgagctaactaggttcaaaggattgaaatccatttcaccactaccttcaaatccgataaatttagactccagatcctcaagttatgtactggtggtcataagttttagtagaacattagagctaacattatctctagaagatttgagatgtttagataaaaaagacgttattaagcctttgaaaaatatcaccttcaagcacacaattgatagttccacagaggagaactctcaaattttagcatttacgtcttctaaattttataacacacacacaggctctaacatcaatgacacgagaaattctcaagtttggcttacctcaccaaatgcaataactcaaccttgcattgattataaactcaggaaaactcatcaacttatccacttaaagcaatttcaaatttttagacatcttaggatatggaaatgtaagaaccttgatattgctctgttacagagacttggaataaaccagtcaaataccgaaagttcgttaatttttgcgaccgacgctgtttctaacaacagaatatttttattagatttaactatgacaacgacaatcgataatgatgatcccgttcaaggactgataaatatagaagatttactatgtgatactgaaaacgaaactatccttctaaattttacgaaaaataacttgattcaagtaactagggatacgatatacatcgatcccattggtggggacaaagagttgcgtaagatttctccaggttgggaattcgaaaacgttacatacaatgatggtattttaatagtttggaatgctgggcttggctgtgtctcttatattgaaaatatagacgctgttgatgagtctggcgccttagtttcaaacttaagcagcagcaaaggcatgagcaagttcttcaagcagttaggaactgtcacgagtgtcaattttcaaatcaaagagtctacagatgatccaaccaagtatgacatttggatccttttaccagactgtgtcattcgtacacccttttctgactggattagtgattcacttgatttttctgatgtgtatattttgagtgttcagcaggcgttaataaacggcccttatttttgctctctcgattatgaatcatattttgaggtgcacactttacagaacaactgcttcaaaaaaggatccagatgtacaagcagagttaattttcaagggaaagatattaaatttagaagctttggtgtgaatcaatgtttggcatttagtgcatttgaaatttttgtcatcaatttaacgccaattcacgacagtagagaattggatttttacaagctaaaattaccgcacctaggtaataacaattcaattcttgaagtctgtccggacatagaaaacaaccaattattcatactctactctgatggcttaagaatcctcgaactatcatacctaacatcaaataatggaaatttcttattaaaatctacaagaagcaaaaataagaaatttttatatctagacaaaataaatcgaatgctggtattgaatcaggacttgagggaatgggagtgtattagactatcagatggtaaggcagttggtttagattctcaacttcttaaggatgattctgaagaaatcctagaaataaaggaattaccaatagcaacagaggacaatcctttagaaaagaaaactgtattattgatctcttttactagctcattaaaactagttttattaactgctgcaaaaaacaaaatttccaatcaaataatagattcgtataaacttgacaattcaagactcctcaatcatttggtcattactcccagaggtgaaatattctttctggattataaagttatgggcaccgataacgaaatgtcctttaacaagttgaaagtcacaaaacattgcattgaccaggaggagagaaataatacgactttgcggctcactttggaaacccggtttacatttaagagttggagtacagttaagacgtttactgtagtaggcgataatatcattgctaccacaaatatgggcgaaaagctctacttgattaaggatttctcttcatcatctgacgaatcgagaagggtgtatcccttggaaatgtatcctgattcaaaagttcaaaagataataccattaaatgaatgctgctttgttgttgccgcttactgtggaaataggaacgatttagattcaagattaattttttactctttacccaccatcaaagttgggcttaataacgaaacaggcagcctaccagatgaatatgggaatgggagagtcgacgacatattcgaggttgactttcctgaaggatttcaatttggcactatggctttgtatgatgttttacatggtgagaggcacgtaaatcgttacagcgaaggcatacggtcggagaatgacgaagcagaggttgccctaaggcagcgtagaaatttactactcttttggcgaaaccactcttctacaccaaaaccttcactacgccgagccgccactatagtatatgaggatcatgtatcatcccgttattttgaggatataagttctatattaggaagcactgcaatgagaactaaaagactatctccctataatgcggtagcattggacaagcctattcaagatattagttacgatcccgcagtacaaactttatatgtgctaatggcagatcaaacaattcacaaattcggcaaggacaggttgccttgccaggacgaatacgaaccaagatggaattctggctatttggtttcaagaaggtcaatagttaaatctgacctcatctgtgaggttgggttatggaaccttagcgataactgcaagaacacagtataa

SEQ ID NO: 191186 - DNA, 630 bp, Saccharomyces pastorianus
atgtcacaacaagttggtaacagtatcagaagaaagctggtaatcgttggtgatggtgcctgtggtaagacatgtttattaatcgtcttttccaagggccaatttccagaagtctacgtaccaactgtctttgaaaactatgtagcagatgttgaagttgatgggcgtcgtgtagagctagcgctatgggataccgctggtcaagaagattatgatagactaagaccattgtcatacccagactccaatgtcgtattaatttgtttctctatcgatcttccagattctttagagaatgtacaagaaaaatggattgccgaagtattacatttctgtcaaggtgtgccaattattcttgttggttgtaaagtggatttgagaaacgacccacaaaccattgaacaattaagacaagaaggtcaacaacccgttacatcacaggagggacaatctgtagcagaccagattggcgcaaccggatactacgaatgttcggccaagactggttatggtgtcagagaagtgtttgaggccgccactagagcttcattgatgggtaaatctaaaacgaatggtaaagctaagaagaacactactgaaaagaagaagaagaagtgtgtcttgttatag

SEQ ID NO: 191187 - DNA, 348 bp, Saccharomyces pastorianus
atgggtaatttcagatttcctataaaaaccaagctaccaccagggtttatcaatgctcgcatacttagggataacttcaaaagacaacaatttaaagagaatgaaatccttgttaaatctttgaaattcatcgctagaaatatgaaccttccaacaaaactgaggttggaggctcagttaaaactaaatgcattgccaaactacatgagatctacgcagatcaaaaataggtgcgtggactctggacatgcaagatttgttctaagtgattttaggttgtgtaggtatcaatttagagaaaacgctctgaagggtaatttgccaggtgttaagaagggtatttggtaa

SEQ ID NO: 191188 - DNA, 786 bp, Saccharomyces pastorianus
atgaagacctatcatttgaataatgatataattgtcacacaagaacagttggatcattggaatgaacaactaatcaagctggaaacgccacaggagattattgcatggtctatcgtaacgtttcctcaccttttccaaaccactgcatttggtttgactggcttggttactatcgatatgttgtcaaagctatctgaaaaatactacatgccagaactattatttatagacactttgcaccatttcccacaaactttaacactaaaaaacgagattgagaaaaaatactaccagcctaaaaatcaaaccattcacgtatataagccggatggatgtgaatcggaggcagattttgcctcgaaatacggggatttcttatgggagaaagatgatgacaagtacgattatctggccaaagtggaacctgcacatcgtgcctacaaagagctacatataagtgctgtgtttactggtagaagaaaatcacaaggttctgcccgctcccaactgtcgattattgaaatagacgaacttaatggaatcttaaaaataaatccattgatcaattggacgttcgagcaggttaaacagtatatagatgcaaacaatgtaccatacaacgaacttttggaccttggatatagatccattggtgattaccattccacacaacccgtcaaggaaggtgaagatgagagagcaggaagatggaagggcaaggccaagaccgagtgtggaattcatgaagccagccgattcgcgcaatttttaaagcaagatgcctag

SEQ ID NO: 191189 - DNA, 474 bp, Saccharomyces pastorianus
atgaatggaaacagcactaacaatgaacaattgcagcaagaactggccactactcaagaccaagtggcttcgattattgagtccttcgttgaattaggtgtctcgatatatgattttcctggtactccagaagccaccaagggaatgatcaccaacttgcaaagaaatgtggatcgcttgtacaagctgaacgtgagaagcaacgatcctcaatccagcttgtctaaggtggacattcccttggaagttgttcaatacattgaggacggtagaaatccagatatttacacaagagagttcgtggaagccataagaagatccaaccaatatcaaagaggcaagatgcatggattgaagcaattaagagattcacttgctgacaagattgtggatgaatttccagagttgaaagaacctgttgaagatattataaagagaacatctcccattgacaatgtctccaatactcactaa

SEQ ID NO: 191190 - DNA, 1545 bp, Saccharomyces pastorianus
atggcatcatcgccacaattggaagaggaagcagctgggaaattagaaacaatccacgcatcagctatggcaaagagcaaaaaaaaaacagatgttgtcgattcaacaaacctgcccattctagaattactatcattaaaagctcccattttccagtctcttttacatcctgaactgcccattataataactggctttggtacaggacatattgtgtgccatcgttatgaccccgctaagttgcaatcgcacctagatcgtagacgtagaattgacactgcaactacaggcaaggatgcaaagaaaggtgtatgcccttggattagattagatatagacctagaaactggagatttgaaatttgttgatattgaagaacaacagcaacaaaagcaaacaggaaaagatgaagacttgggcgtaaaaacactttggaagactaaaagacataaaggtagtgtccgtgccatgtgctttgattctaaaggtgacaatattttttctgttggatcggataatgttttaaaaaaggccaatactatgaccggcaaagtcgtcaaaaaggtaaacttaagctcactgtttaattctgaagagaaaaaaaatgataaatttacgaaattatgcgcctctcaaactcacccattcattttaataggcgatgaatccggtaatatacacgtaataaactcggaaaacttggcattatcaaattccattcgttcgatacattttggcgactctatcaacgatattttccactttgataaaagatctgcatataaattcatttctttgggccagacaacgttagcttattttgacgttcgcgacaaagatgccaaaccgaacgtagctggaaacgaggatggtaaaattttgatcagcgatgatcaggaggacgaagttctttgtggttgtttcgtcgatcccgaagtagcagatacccttttgtgtgggatgggcgagggtattgttaccgtctggaaaccgaataagaatgatttggaagatcaaatgagccgtattaaaattagcaaagatgaaagtatcgattgcattgttcctactttacaagatgataactgtgtatggtgtggttgttccaatggtaacatttataaagtaaatgccaaattgggaaaagtcgtcgagataagaaaccacagtgaattggatgaagtcagttttgttgatctagattttgaataccgtgttgtttctggtggtttggaaaacatcaagatatgggaattatcgagtgatgatgtagaggaaaatgcatcggtagagtccgatagcgacgaacccctctcccactctgatgaggatctaagtgatgacactagttctgatgatgaaacgacgcttgtcgggctctcaaaggaagagctattagacgaattagataaggacctcaaggaagatcatcaagaggaaaaagaatccaactcaaaatctgtcaaaaaaagaaaaataatgaaggagaacaacaaaaaaaaggacctgtatgagcatgggatcaagaagtttgatgatttatag

SEQ ID NO: 191191 - DNA, 219 bp, Saccharomyces pastorianus
atgagacccgttgtatccactggtaaggcatggtgttgtaccgtcctatcggcatttggtgtagtaattctttccgtcattgctcatctcttcaacacaaaccatgaatcctttgtaggatcaataaacgatcctgaagatggacctgcgtatgttatattttcttatttatttcgccgttacccatttaccatctcttatatctctcctccttactaa

SEQ ID NO: 191192 - DNA, 336 bp, Saccharomyces pastorianus
atgacggaaagaattactacaccaaatgccgataggacggtacaacaccatgccttaccagtggatacaacgggtctcattttttttgcggtgtttgcttctagctttgtcctttatcgtagaggttcttgctttgaaagctacctattcttttcttttcccttaagctatttttcaaataatagaaaaaagagtcgcgtgcaaagcgataagcaatttttttcagtctttaaaaaaaatgatcctgaacagcagcatctttattatgcagcgttgatgcagtttctaactcaattagttgaatcacctacgctcttctgtgtttgcactcagtag

SEQ ID NO: 191193 - DNA, 186 bp, Saccharomyces pastorianus
atggacctgcgtatgttatattttcttatttatttcgccgttacccatttaccatctcttatatctctcctccttactaacaattatattttaaccctattgtttatagtgttgcacatactgtttatttggctgccttggtatacctcgtgtttttcgtattctgtgggttccaagtttacctag

SEQ ID NO: 191194 - DNA, 1731 bp, Saccharomyces pastorianus
atgacaaaatatgagcgtgaccctgaattggtgaactttctatcgaaagtggaggatttgaactctaagagatacagtaatattcctagttcaaaaccagcgggggaagcgctttcaccagttagaagtcacaactctggggaatacagaagggctgatatgatgacagggaaaaatgtggaaggttgcgacaatttggcctaccgatctgcgtacaattatgaaatgacgttttctccaaagaagactcattactcattaagtgagctgaatctcgaacgaataacgccaaggccggatttggagggaagtgcctctcaaaaagaaaaaaaatttttaatttctgaagaagattatttattattgcagaaattgaaagcctctcaaacatataatgattccaatgctgacaaaaatttgccttcctttgaaaaaggtcctcgtatgcccagtcggggtcgacccagaccgagagagaaggaaataatcaccatccaatatgattttgaattaccaggaagagccgatataccctcctcctcctcttcttcatcaccaccgcctttgcccacaaggcgtgatcatatcaaaatcacagatgggaatgaagagaaaccgcttcttccaacaaggcctaacaaagcagaagttacagaaagtccgtcatcaaggtcaataaaaccggatgctgtggtacctgagcgcgttaagcctgctccacctgtctcacgctctacaaaaccggcgagctttttaagttctttggaagataacaaattgacaaaggcgaagagttataattcggaaatggaaactcccaaaacaactgtaaaaagttctcatatcgattacttggattccatacaactaaaaccaaccaccttatctcctacaatgaaaaataaacctaaaccaacccctccttctccacctgcgaaaagaattccaagatctgaaagttttatcaagtctatgctaaactcgaatctcacgacaacttccaagccttctttgcctgaaaaacctcaaaagctacggaatgcaaatttggccgcccataagaccaaaccaagcataccgccaaagaaagtggagttgaatatagtattacctgagctacgtcccgtagaaacttctccaacaaagcagaacttcgaaaactcaatcgatttgcccaagttacgatccagcaaccgtaacattaaaaaagaagaggaggacagtattccagaagcaataaaaggtatacaaaatctgaagaaaaccaaacagcagaagcctgcaatccctcagaaaaaatcatttctaacaaataattcgaaaaatactacactcaaaaatggtgatgatattaacaagttaaatgacgaaattgaagctctatcattgcggaataacctgaagaaacggccaccaacggcgccacaacgtaaaatttctttgccagaggcattgcgaaaagtcgaattgatgaaaaaatctaaaaccgagcctgttttagagtcctcaaacgaactgagcataaacgcaaaattagacgcaataattgcctctagaaacttaagagcatctaatactctaccagaacttagcggtgttaacactaatattgcaacttctgacaagtatactacttctagagatgaaacagtgaaggaaactaaaccattagttcacccgaataaaaataggactcgtggtcccagaagaaaacttccaacacgcgtgtaa

SEQ ID NO: 191195 - DNA, 603 bp, Saccharomyces pastorianus
atggcttggactagtacattaccagcgcatctactgaacctgatcaaaaactccaaatatgttcacgtggccacctgttctaaagactgcatcccttcagtggcattgatgaactatatctatgtgccaggtgaaaaactgttcggtcaaacagataataagaatgactacattatatttgtttctcctcaggacacacaaaagttttacaacatcaaggagaaccctaaggtcgccctgttgtttcacgattggatcatcgcgaataatttgtcagtgggcaaggaaagcatctctgggactccgacgccgacttctattcctcatgaagagcaacgtcaaagcgagcttttaaatttgttacaggagttaaatcaagccgaattgaaccaaatgagcgcatctattggtggcgaaaccgaaattgtcaatcctgaaagtgaagaatccaagtactataaagatttaatactaaaggctaatcctgatgcgaaagcttttatatttgaaaagaacaccgccgttgttaaagttagaattgataatgctagggtatccaataatgagaacagaacaatgtttctaagtaaagggaagagttaa

SEQ ID NO: 191196 - DNA, 1314 bp, Saccharomyces pastorianus
atgagcacgggagattttttaactaagggaatagaactggttcaaaaggccattgacctggacacagccacgcagtatgaggaggcgtatacagcatactataacggattagattatttgatgttggctttgaaatacgagaaaaaccctaagtcgaaggatttgataagagcgaagtttacagagtatctaaaccgtgcagagcagttgaaaaagcacttggaaagtgaagaggcaaacgcggcaaagaaatctcctagcgctggtagtggttccaacggtggtaataagaaaatctctcaggaagagggtgaggataatggtggagaagacaacaaaaagctaagaggtgccttatcgagtgctattttgtctgagaagcccaatgttaagtgggaagacgtggctggactggaaggagccaaagaggcccttaaagaagccgttattttacctgtcaagttcccacatttgttcaaaggtaaccgtaagcccacttcgggaatcttattgtacggaccaccaggtacaggtaaatcatatttggcaaaagcagtggccaccgaggccaattctacctttttcagtgttagttccagtgatttggtttctaagtggatgggtgaatctgaaaaacttgtcaaacagttatttgcgatggcaagagaaaataaaccttctattatttttatagatgaagtggatgcgctaacaggtaccagaggagaaggagagagcgaagcaagtagaagaattaaaacagaattattggtacaaatgaatggtgttgggaatgactcccaaggtgttttggtccttggcgcaacaaatatcccatggcaactggacagtgccatcaggagaagatttgaaagaagaatatatataccattaccagatttggcggcaagaaccaccatgttcgagattaacgtcggcgacactccatgcgtattgaccaaggaagattatagaactttaggtgcaatgactgaaggttattccgggagtgatattgctgtagtggtgaaagatgcgctaatgcaaccgataagaaaaattcaaagcgcgacacatttcaaagatgtctctacggaggacgacgaaacaagaaaactaacaccatgctctccaggtgatgatggcgccatcgagatgagttggacggatattgaagctgatgaattaaaagaaccagatctcaccataaaggatttcttaaaggctatcaaatcgacgagacctaccgtgaatgaggatgacttgctgaagcaagaacagttcactagagattttggtcaagaaggtaactag

SEQ ID NO: 191197 - DNA, 666 bp, Saccharomyces pastorianus
atgggaattcaggaaaagacattggggatacgaaaagagcgcaaattggtggttgtgcctcgcgaaagaaatcatgttagacacgcttcacaaaggacacgttctaaaaactacaagaatatctccaaaaagagggctcaacaacacgcgtttggattcaatattgctaagactcttgccaagatccaagcgtttgtatgggggtctcccgcagatgaggaagaagaaagcgttgtcccattgtctaaaaattctcaggattgtgtgcctctacaatggcaagcaaagtttgcgcaattgcggcagcagctgcactctacacaaaaggaactacaatttgtcaaggaaaagtgtcatctgttgcagtcggtgttggacgacgcaaacatcgatcaaagatacctggagtctcgtcgagacatgaaaaatattgagcgagacaacctcaaaccgacagaaaatttaccaccttcgccagtaagagcagtaaacccgttagtgacttcaagtccgattcacatgtcgccactccagtcgcgccaacgaccagtttcttccctacagcccccaaagggccccaacttctacgccaagtatcctaagcttcctcaaacgaacattctcagagaatctccgactgaggattcggttccgcacgctgaatag

SEQ ID NO: 191198 - DNA, 2079 bp, Saccharomyces pastorianus
atgtgtgaaatgtttggctctgggaatgttctgcctgttaaaattcagcctccgctgcttaggccactggcgtatagagttttatcaagaaaatatggtttatcaattaaatctgatggactgtctgctcttgcagaattcgttggcactaatataggtgctaactggagacaagggcctgctacaataaaatttctcgagcaatttgctgcagtatggaaacaacaagaaagaggccttttcatcgaccagagcggggttaaagaagttatacaggagatgaaagaacgtgagaaagtcgaatggagtcatgaacaccctattcaacatgaggagaatatcttgggacggacagatgacgatgagaacaacagtgacgatgaaatgccgatcgctgctgattcatccttacaaaatgtttcattatcttcacccatgcgacagcccaccgaaagagatgaatataaacagcctttcaagccagaaagctccaaggcgttggactggagggactacttcaaagttatcaatgcttctcagcaacaaagattctcatacaatccgcacaaaatgcaatttattttcgtccccaataaaaagcagaatgggctaggaggcattgcgggttttctaccagatatagaggacaaagttcaaatgttcttgacaagatattacctcacgaacgacagagtcatgagaaatgaaaacttccaaaacagtgacatgtttaatccattatcatctatggtgtctttacaaaatgaactgtccaatactaaccgacagcagcaatccagcagtatgagtatcaccccaataaaaaacctactaggtagggatgctcaaaactttctactattggggctcttaaataagaactttaagggcaattggtcactggaagatccgtctggatctgtcgaaattgacatttcccaaactatccctacacaaggccattactacgtgccaggttgcatggttcttgtggaaggaatatactattctgtaggaaataaattccatgttacctccatgactttaccccctggtgagagaagagaaattacattagaaacgataggtaatctcgatctcttaggaatacatggcatttctaataacaatttcattgctcgtttggataaagatttgaagattagattacaccttttggagaaagaattaacagatcataaatttgtaattctcggcgcaaatttgttcctagatgatttgaaaattatgactgcactcagcaaaattttgcaaaaattaaatgatgacccaccgaccctattaatttggcaaggttctttcacttcagttcccgttttcgcatcaatgagtagccggaatataagtagttccactcaatttaagaataatttcgatgccttggcgacgcttctgtcaagatttgacaatttgaccgaaaataccacaatgatatttattccaggtcctaacgatttatgggggtcgatggtgtcattgggggcaagtgggacattaccgcaagatccaattcctagtgcgtttaccaaaaaaatcaacaaggtctgtaaaaacgttgtatggagctcaaatccaactagaatagcatacttatcccaagaaatagtcattttcagggacgatttatccggaagattcaaaagacaccgtttggaattcccattcaacgagagcgaagatgtttatactgaaaacgataacatgatgtctaaagacaccgatattgtaccaatcgatgaattagttaaagaaccagaccagttaccacaaaaggttcaagaaacaagaaaactcgttaaaacaatactagaccagggtcatttatcgccatttcttgattccttgcgcccaatttcatgggatttggaccacactttgacactttgcccaataccatcgacaatggttctttgcgacactacttctgcacaatttgatttgacatacaacggttgtaaagtaattaaccctggaagtttcattcataatagacgtgctaggtatatggagtacgttccatcctcaaagaaaactatacaagaagagatatatatctaa

SEQ ID NO: 191199 - DNA, 978 bp, Saccharomyces pastorianus
atgtcaggatctcttacgctacttaaggaaaagcatatacgttatattgaatcattggatacaaagaagcataattttgaatactggcttaccgagcatcttcgtttgaatgggatatattggggacttactgccttgtgtgtgcttgattctccagagacatttgtgaaagaagaggttatatcatttgttctgagctgttgggacgacaaatacggcgctttcgcaccatttccaagacatgatgcacatttattaactacattgtccgccgtacagatcttggccacttatgatgctttggatgttcttggaaaagatcgtaaggttcgcttgatttccttcatccgtgggaatcaattggaagatggttcgttccagggtgacaggtttggggaggtagatacaaggtttgtttatacagccttgagtgcactatcaattttgggtgaattaacgtctgaagttgttgaccctgctgtagactttgtactcaagtgttataattttgatggtggctttggattatgtcctaatgctgaatcccatgcagctcaagcttttacctgtcttggcgctttggcaattgctaacaaattggatatgcttagtgacgaccaactagaagaaattgggtggtggctttgcgaacgacaattaccagaaggtggactaaacggtaggccaagtaaactgcccgatgtttgctatagttggtgggttttatcttcattagctattattggtagactagattggataaattatgagaagctaactgagtttatactcaaatgtcaagatgagaagaagggtggaataagcgacaggcctgaaaatgaagtggatgtcttccatacagtttttggtgttgctggtttaagtttaatgggatacgacaatttagtccccatagatcccatatattgtatgccgaaatccgttacatcaaaattcaaaaagtatccatacaaatag

SEQ ID NO: 191200 - DNA, 372 bp, Saccharomyces pastorianus
atgagctcagatgttgctggagtgaagaagtcctcatcgtcctcttcgtctacttcttccccatttatgttttccatgttattaatgttctcaagatcaatttcatcaaccattaaaatttcagccaaccgtattcttctttgttgtacatcttcattctccactacttccggcttctttaaaattgaaagcaatcgtctcacctcaagatcttcttctggtatcttctccaggacagcttgtaatcgttcatgtggcaactgtttcagtatatcagcggtgctttcattttgtgtagctcctttatgttgcaaatctaccggaagattttcaagtgcaatatatttactcatattccgttcaacaaggtaa

SEQ ID NO: 191201 - DNA, 1398 bp, Saccharomyces pastorianus
atgagtaaatatattgcacttgaaaatcttccggtagatttgcaacataaaggagctacacaaaatgaaagcaccgctgatatactgaaacagttgccacatgaacgattacaagctgtcctggagaagataccagaagaagatcttgaggtgagacgattgctttcaattttaaagaagccggaagtagtggagaatgaagatgtacaacaaagaagaatacggttggctgaaattttaatggttgatgaaattgatcttgagaacattaataacatggaaaacataaatggggaagaagtagacgaagaggacgatgaggacttcttcactccagcaacatctgagctcatttttgcgagaagatttttgataaattattcacttgaaagatctcgaaagaggctacagaaagagatggaaagacatcaaaagttcaatacaagacaggaattactcagtcggcgtacagaattacagcgtatggctaatttagagcttgctggctctcaattagtatctacgaagcctatttccgcagtttctttatctaccgatgacatggttgtcgcaacgggaagctgggcaggtgatcttcaggtattaaattctcaaacactgcagccattgacacaaaaactcgactctcatgtagggaaaatcggagctatagattggcatcctgattcaaacaatcaaatgatttcatgcgcagaagacgggctcatcaaaaactttcaatactcaaacgaagagggcggccttcgattattgggagatcttgtgggacatgaaagacgtatttctgatgtgaaataccaccctagtggcaaatttataggtagtgcctctcatgatatgacttggagactttgggatgcgtcaacacatcaagaactgctgctacaagaaggccatgataagggagtgtttagtctgtcttttcaatgcgatggatctcttgtttgtagcggtggcatggactcgctttcaatgctatgggatataagatccggaagtaaggtgatgacactcgcaggacactcaaagcctatttacaccgtagcttggtcaccaaacgggtatcaagtagccactggtggtggtgatggaatcattaatgtttgggacatcagaaaacgggatgaaggccaactaaatcaaatattggcgcatcgtaacatcgttacgcaggtaaggttttcaaaggaagacggcggaaagaaacttgtctcttgtggctatgataatttgatcaatgtgtatagtagtgatacgtggttaaaaatgggaagtttagcaggccacactgataaaattattagcttggatatttcgaataattctcattttttagtgagcggcggatgggataggtctatcaagctctggaattga

SEQ ID NO: 191202 - DNA, 1968 bp, Saccharomyces pastorianus
atggatttactacgcattttagacacgaaaccaatacctacaattgttgatgctactactctgggaatctcaggaaatacttccggtgattattggctgccaactacaatgtcgctttatcaaaaagaactcacggatcaaatagtatcattacactactcagatatcttgagatacttcgaaacgtcacactacaaagaggacgtcattctcgaatctatgaagaccatgtgtttaaatggttcactggtagcaacccatccatacctactaatagatcattatatgcctaaatcgttaataactcgtgatgttcctgcacatttagcggaaaatagtggaaagttcagcgttttgagagatctcataaatcttgttcaagaatatgaaactgaaacggccattgtttgtagacctgggagaacaatggacttactggaagccttactattgggaaataaggtgcatatcaaaagatatgacggtcattctatcaagtcaaaacaaaaggcaaatgacttctcgtgtacagttcatttgttttcttctgaaggaattaatttcacaaaatatccgataaaatccaaggctcgattcgacatgctgatctgcttagatactacagtggatacaagtcaaaaagatattcaatatttgttgcaatataagagggagaggaagggtttagaaagatatgctccaattgttaggctagtggccattaattcaattgatcattgtaggttattctttggtaaaaaatttgacaagaacagtagagaatacttggagaacgttaccgcagctatggtaattttaagagatcgactgggcacacttccacctgatttgaggcccatttattcacaaaagctgcattatttagtagaatggttggaaaacccaacagtaccgtggccattaccagatatttaccctttaaaacaatatacttccatggatgtagaaaggtctttgttaacggaagtacatttcaaaaagtcagatgatcaactagaggatgctttttccaactgttccaaaaaaagaggacgccatggtgctaataaggcagcatcttcaactgttgccggaattgaggataatattactccaagtttttactctaccaaaagattaaagaacgattattatacaaatcctttaaaacaagacatgacacaactaacaggtattactacagctgacaactcctcgaatgtaaattaccacttatcaagtggaatcataacacacaaactgattcaatcaatgggagaagtgtatatggatatttgcgttcagaaacaggagctggatgattattcttgccttgatgatttgcaaaatgatcatctgaaatttttctcaaatgaagatgagaaaattataaaagaatatgaaaccgtattgcgaaccaataatgaaaacttaaataggtcgcatgaactagaagttgaaaacaatttgaagttttcccaaatcgaaacactggaaaaagacattgaaactttaaagggaagtttgatggcccaaggtgaaacattatcaaagttaaaagacgctttcgttaaaacagacaatgtacaagacgagatcgagaaagaagaaagggtaagtgtatcaagggatactgagaagaaatatatggaacaagaaatcaaaagagccgttgatgctataagggaaaatgaggaggagacacacaaacttaatgagaaacaaaatggattagaaagtgagttgaaattgaaattcgaaaagtctgaaatctctacaaaagaattgaatgagaaaattggctttttgaaaaaggaattaaagcttgagaatgatctaaacgaggagttagtgggacagttatcgaagacgatggacaacttggaaaacttaacaattccacgagttcgtactcaaaatggtaacacaaaaaaaaaatccagggcaaaaaaaccaggaaatgtataa

SEQ ID NO: 191203 - DNA, 1044 bp, Saccharomyces pastorianus
atggatatgaaagtagaaaaattaagtgaagatgaaattgcactgtatgatagacagattcgtctatggggaatgacagcacaggccaatatgagatcagcaaaagtattgctgatcaatcttggagcaattggttctgaaattaccaaaagtatcgtccttagtggtatagggcatttaaccatattggatggacacatggtgactgaagaagatttaggatcccagttcttcataggctctgaagatgttggccaatggaagattgatgcaacaaaagagagaattcaagacttgaacccccgtatagagttgaactttgataagcaggatttgcaagaaaaggacgaagagttctttcagcagtttgatttagtcgtggctacagaaatgcagattgatgaagcaatcaaaattaacacattaactcgaaaactaaacattccattatatgttgctggttctaatggattgttcgcttatgtttttattgatttgattgaattcatttcagaggatgaaaaattgcaaagtgtaagacctaccaccgttggtcccatttcaagcaataggagcattatagaagttactactagaaaagatgaagaagatgaaaaaaaaacatatgaacgaatcaagaccaagaactgctataggccactgaacgaagttttaagcacagcaacattaaaggaaaaaatgacgcaaagacagttaaaaagagtcactagtatcttgccgttaaccctgtccttattgcaatatggtctcaaccaaaagggcaaggccataagctttgaacaaatgaaaagagatgcggccgtatggtgtgaaaatctgggtgtaccagcaacagtggtaaaggacgattacatacaacagtttatcaaacagaaaggtatcgagtttgctcctgtcgcggccattatagggggtgctgtagcgcaggatgtcattaacattctaggtaaaaggctatctccattaaataatttcattgtttttgatggtattacattagacatgccactttttgagttttag

SEQ ID NO: 191204 - DNA, 2307 bp, Saccharomyces pastorianus
atggacttcgagactaatgaagacatcaacggggtccgtttcacctggaacgtgtttccctctactagaagcgacgctaacagcaacgtcgtccctgtgggctgtttgtacacacctttgaaggagtatgacgaattgaacgttgccccatacaatccagttgtgtgttccggtccacactgtaagtcgattctaaatccttactgtgtgattgatccgcgcaattcgtcctggagttgtcccatctgtaactccaggaaccatttacctccacagtacaccaacttgtcacaggagaatatgccgctagagttacagtccaccaccattgagtacatcaccaataagcccgttaccgttcctcccattttcttctttgttgtggatttgacttcggaaaccgagaacctcgattcgctaaaggagtctatcatcacttctttgtctctattacctcccaacgcgctgattgggttgatcacttacggaaacgttgttcaattgcacgatctgtccagcgaaactattgacaggtgcaacgtgttcagaggagacagggagtaccagctcgaagcgttgacggaaatgttgaccggccaaaagcctaccggccccggcggtgctgcatctcatctaccgaacgccatgaacaaagttacgcccttctctttgaataggttcttcctgcccttggaacaggtcgagttcaaactgaatcaattactggaaaatctgtctccagaccaatggtctgttccagcgggtcataggccattaagggccacaggttccgctttgaacattgcatctttgcttttacagggctgctataagaacatcccagcaagaatcattcttttcgcctccggtccaggcaccgtggccccaggtttgattgttaactcagagttaaaagatcccttaagatcccaccacgacatcgattctgatcacgcgcaacattacaagaaggcctgtaagttttacaaccagattgcacaaagagttgccgccaatggacacactgttgatatttttgccggttgttacgatcaaatcggtatgtctgaaatgaaacagttgaccgactctactggaggtgtgttgttgctaaccgatgccttctctaccgcgatttttaagcaatcatacttgagattgtttgccaaggatgaagaagggtatttgaagatggctttcaatggtaatatggcagtcaagacaagtaaagacttgaaggtacaaggtttgattgggcatgcttctgctgtaaagaagacagacgctaacaacatcagtgaatctgaaatcggtataggtgcaacgtccacctggaagatggcttccttatcgccttatcactcgtatgcgattttctttgaaattgcaaacactgcggctaattctaacccaatgatgtctgcccctggttcagcagatagacctcatctagcatatactcaattcatcactacttatcaacactcctctggtaccaaccgtatcagagtcaccacggtcgcaaaccagcttttgcccttcggtactcctgccattgcagcttctttcgatcaagaagctgctgccgttttgatggctcgtattgctgttcacaaggctgaaaccgatgatggtgcagatgttattagatggttagacagaactttgattaagctatgtcaaaagtacgccgactataataaagatgatcctcaatctttcaggttggctccaaatttctcactgtatcctcaatttacctattatttaagaagatcccaattcttaagtgtctttaacaattctccggatgaaactgcattttatagacatattttcacaagagaggatacgactaattctttaatcatgattcaaccaactctaacttctttctcaatggaggacgatccacaaccggtattattagactctatctccgtcaaacccaataccattctattattagatacatttttcttcatcttaatataccacggtgagcaaatcgctcaatggagaaaagccggttaccaagacgatccacagtacgcagatttcaaagctcttcttgaagagccaaaattagaagccgcagaattgttagtagataggttcccgctaccaagattcattgatactgaagccggtggttctcaagccagattcttgttatctaaattgaatccttccgataactatcaagacatggcgcgcggaggatctacaattgtcttaacagatgatgtttccttacaaaatttcatgactcacttacaacaagtagccgtctctggtcaggcatag

SEQ ID NO: 191205 - DNA, 261 bp, Saccharomyces pastorianus
atgagcgagagcagtgatatcagcgcgatgcagccggtgaacccgaagccgttcctcaaaggcctggtcaaccatcgtgtaggcgtcaagcttaagttcaacagcaccgaatatagaggtacgctcgtgtccacggacaactactttaacctgcagctgaacgaagcagaagagtttgttgcgggtgtctcgcacggcaccctgggcgagatattcatccgctgcaataacgtgctgtacatcagggagctgccgaactaa

SEQ ID NO: 191206 - DNA, 804 bp, Saccharomyces pastorianus
atgagcatcgaatactctgttatcgttcccgcttaccatgaaaagctgaacatcaaacccttaacaaccagattgtttgccggcatgagccctgaaatggccaagaagaccgagttgatctttgtcgatgacaactcacaggatggctccgttgaggaggtggacgccctagctcaccaaggctacaacgtccgcatcatcgtcaggacaaatgaacgtggtctatcctccgccgtgcttaagggtttctacgaggccaagggtcagtacctggtatgcatggacgcagacctacaacaccctccagagaccgtgcccaagttgttcgagtctttgcacgatcacgcctttactctgggcaccagatatgccccaggtgtcggcattgacaaggactggcctatgtacagacgcgtcatttcctccactgctagaatgatggccagacctttgaccatcgcctccgaccccatgagcgggttcttcggtctacaaaagaagtacctcgaaaactgcaaccctagggacatcaactcgcaaggtttcaagattgccctcgagcttctcgccaagcttcctcttccaagagaccctagagtggcgatcggcgaagtgccattcactttcggcgtgagaacggaaggtgaatccaaactgtcaggtaaagtcattatccaatacttgcaacaacttaaggagctctacgtcttcaagtttggcgccaataaccttatccttttcattactttctggtccattctgttcttctacgtttgctaccagctataccatttggtcttttaa

SEQ ID NO: 191207 - DNA, 4611 bp, Saccharomyces pastorianus
atgaatagatcattactgctacgtttgtcggataccggtgaacccattacaagctgctcttacggaaaaggtgtcttgacgctaccaccaattccgctccctaaggacgccccaaaggaccaaccgctctatacggtcaagctactggtatctgcaggttcccctgtcgctagggatgggctagtttggactaattgcccaccagatcacaacacgcccttcaagagggacaaattttacaaaaaaatcattcattccagctttcacgaggatgactgcattgacctgaatgtctacgctccaggctcgtactgcttttatctatctttcaggaacgataacgaaaaacttgagacaacaaggaaatactactttgttgccttgcccatgctttatataaacgatcagttcctacctttgaattccatcgctttacaaagtgttgtatcgaaatggctgggctctgactgggagcccatcctatcgaaaattgccgctaaaaactacaatatggtacatttcacccctctacaggaaagaggcgagtctaactcgccttactctatatacgaccaattgcagttcgaccaggaacactttaagtctcctgaagacgtgaaaaatttagttgagcatatacatcgcgatttaaacatgctttcattaacagatattgtttttaaccacacagctaataattctccttggttagttgagcacccggaggctgggtataaccacatcactgcgccacatctaatcagcgccatagagctcgaccaagaattgctcaattttagtaggaatttgaaatcctggggctatcctaccgaactgaaaaatatagaagatctcttcaagatcatggacggtattaaagtgcatgttttagggtcgttgaaactgtgggaatattatgcggtaaacgtgcaaacagctcttcgggatatcaaagcccattggaatgacgaatctaacgaaagttacagttttcccgagaatattaaagacatctcgtccgatttcgtaaaactagcttcctttgtgaaggacaacgtcactgagcctaacttcggcactcttggtgaaagaaactcaaacaggattaacgtgccaaaatttattcaactactgaagctcattaacgatggtggtagtgatgacagtgaatcttcgttggccacggctcaaaacatcttgaacgaggtcaacttacccttatatagagaatacgacgatgatgtcagtgagatactcgagcaactgttcaatcgtatcaaatatttgagattagatgacggtgggcccaagcaaggtccagtgaccgttgacgtgcccttaacagagccttattttacgaggttcaaaggaaaagatggtactgattatgccctcgccaacaatggctggatatggaatggtaacccactagtggattttgcatcgcagaattcaagagcttatttacgtagagaagttatcgtgtggggggactgtgtcaagttaagatacggtaaaagccctgaagactctccgtatctgtgggaaagaatgtccaagtatatagaaatgaacgccaagatatttgacgggttcagaattgacaactgccattctactccaatacatgttggcgaatatttcctagatttggcaagaaaatacaacccgaacctatatgtcgttgcagagctgttttctggttccgaaacactagattgtctgtttgttgaacggttgggtatctcctctttaatcagagaggcaatgcaagcctggtccgaagaagagttgtctagattagtccataagcatggcgggaggcccattggctcctataagtttgttcctatggatgacttctcatatcctgcggatattaatttaaacgaggagcattgtttcaacgactccaacgataactccataagatgtgtatcagagatcatgattccaaagattttaaccgccactccgccacacgctttattcatggactgtacccatgataatgaaactccctttgaaaaaagaacagtggaggatactttgcccaatgctgcattggtggctctttgctcgtccgccattggatctgtttatggctacgacgaaatttttccacatttactgaatttggtcactgaaaaaagacattatgacatttctacgcctactggtagcccctcgataggaataaccaaagtcaaggccactttgaattcgattagaacgagtataggagaaaaggcgtatgacattgaagactcagaaatgcatgtgcatcaccagggccagtacattacttttcatcgtatggatgttaaatccggaaaaggttggtacttgatagcaaggatgaaattttctgacaatgatgaccctaacgagactttaccaccagtggtgttaaaccaatccacctgttctctcaggttttcgtatgctttggaaagagttggcgatgaaattcccaacgacgataaattcattaaaggtattcccacgaaattaaaggagcttgaagggtttgacatttcttatgatgattctaagaagatttcaacgataaaactgcccaatgaattccctcaaggatctattgccatttttgagacccaacagaatggtgtggacgaatccttagatcattttataaggtcaggtgctttaaaggccacttcaagtttgactctagagtcaataaattccgtcttgtatcgtagtgagccggaagaatacgatgttagcgccggcgaaggtggtgcttatattattcctaattttggaaagcctgtgtattgtggtctgcaaggttgggtttccgtattaagaaaaattgtgttttacaatgatttagcacatcccctcagtgcaaatttaagaaatggacattgggctttagactacactatcagtagacttaattactatagcgatgaagcaggaatcaatgaagtgcagaactggctgcgttcaaggtttgatagagtgaaaaagttaccgagctacttagtgcccagttatttcgccttaattatcggcatcctctatggttgttgtcgcttaaaagcaatacagctaatgtcccgtaatattggtaaatctacattgtttgtacaaagcttatctatgacatcaatccagatggtttccagaatgaagtcaacctctattttaccaggcgaaaatgttccatctatggctgcagggttgccacactttagcgtaaactacatgagatgttgggggagagatgtattcatatcgctaagaggtatgctattaacaacaggtagatttgatgaagctaaagctcatatactagcctttgcaaagactttgaagcatggtttaattccaaacttgctggatgccggtagaaacccgagatataatgctcgtgatgctgcctggttcttcttgcaagctgtacaggattatgtttatattgttcctgatggcgaaaaaatattacaagagcaagtaacaaggagattcccactggatgatacttacattcctgtagatgatccaagggcatttagttactctagtaccttggaggagatcatttatgaaattttgagtaggcatgccaagggaattaaattcagagaggctaatgcaggtccaaatttagatcgtgttatgactgataaagggtttaatgttgaaattcatgtcgattggtcgactggcttaattcatggtggatctcagtataactgtggtacttggatggataagatgggtgaaagtgaaaaagcagggtctgttggtattcctggaacacccagagatggagccgcaatagaaatcaatgggcttttaaaaagtgctttaaggtttgttattgaactaaaaaacaagggattgtttaagttttccgatgtggagacgcaggacggcgggaggatcgatttcactgaatggaatcaattacttcaagacaatttcgaaaaaagatattatgttccggaggatccatcacaggatgcagattatgacgtgagcgctaaattgggtgttaatagacgggggatatacagagatttgtacaaatcaggaaagccttatgaagattatcagttaagaccaaattttgctattgccatgactgtggcaccagagttatttgtgcctgagcatgccataaaagcaatcaccattgcagatgaagtcttaagaggtccagtaggtatgcgtactttagacccaagcgattacaattaccgtccgtactacaacaacggagaagattcggatgattttgccacctcaaagggtagaaactatcaccaaggccctgagtgggtctggctttacggctactttttaagagcgttccatcatttccactttaaaaccagtccacgttgtcagaatgctgccaaagagaaaccatcctcttatttgtatcaacaattatactacagattaaaaggccatagaaaatggatttttgaaagtgtgtgggcaggattgacagagctaaccaataaagatggtgaagtatgcaatgactcaagccccacgcaagcctggagttctgcttgtttgttagatctattttatgatttatgggatgcctacgaagatgattcctga

SEQ ID NO: 191208 - DNA, 2217 bp, Saccharomyces pastorianus
atggttgccgaagaggacatcgagaagcaagtccttcaattgatagacagcttttttctgaagactacactactaatatgctccaccgaatcaagtcgataccagtcttctacagaaaatatattcctatttgacgacacatggtttgaagatcactcagaattagtgagtgagctacccgagataatatcaaaatggtctcactacgatggtcgaaaagagttgccacccttagtggtagagacatatttggatttaagacagttaaactcgtctcatttagttagattaaaggaccacgaaggccatttgtggaacgtttgcaaaggaactaagaagcaggaaatcgtgatggaacgttggcttatcgaattagataattcatccccaactttcaaatcatacagtgaagatgagactgatgttaatgaactttctaaacagctagtccttctcttccgttatttgttgactttaatacagttactacccacaacagaattataccaattattaataaagtcttataacggcccgcaaaatgaaggaagttccaatccaataacttccacgggcccactagtaagtatccggacgtgtgtccttgacggatctaaaccaattttatcgaaggggagaatagggttgagcaaaccgattattaatacatattccaatgcgcttaacgaatcaaacctgccagcccatttagatcaaaagaagatcacacctgtatggacaaagtttggactcttaagagtctcggtatcatacagacgtgattggaagtttgaaattaacaatacaaacgacgaattattttcagctcgacatgcatctgtctcacataactcacaaggaccccagaatcagccagaacaagaaggacaaagtgatcaagacatagggaaacgccaaccacaatttcaacagcagcagcagccccaacagcagcagcagcagcagcaacagcaacagagacaacaccaggtccagacacaacaacaaagacagatacctgataggagatctctttcactttctccttgtacaagagccaattcttttgaaccacaatcttggcagaagaaagtctatccaatatcgagacctgttcaaccatttaaagttggttcaattggaagtcaaagtgcgagcagaaatccctctaattcatcgtttttcaaccaaccacctgttcataggccaagtatgagctccaactacgggccacaaatgaatattgaaggtaccagtgttggaagcacctcaaagtattcctcctcctttgggaacattcgtcgtcactcaagtgtaaagacgacagagaatgctgaaaaagtatcaaaagctgtaaagagcccactacaacctcaagaatcacaagaagatttaatggattttgttaaattactcgaagaaaaacccgatctaactataaagaagacaagtggaaataatccacccaatatcaatatttctgattctctaatcagatatcagaatttgaagccaagtaatgacttattaagtgaagatttatccgtaagtttatccatggatccaaatcatacatatcacagaggcagatcagattcccactcaccattgccttcaatatccccttcgatgcattatggatcgttgaactcgagaatgtctcaaggcgccaatgcaagccatttgattgcaagaggcggtgggaattcatctactagtgccttgaatagtagaaggaattctttagataagagctcaaacaagcagggtatgtcaggcttacctcctatttttggtggagagagtacttcatatcaccacgacaacaaaatacaaaagtacaaccaattaggagtagaagaagatgatgatgacgagaatgaccgtttgctcaaccaaatgggaaacagtgctacaaaattcaaaagttcaatatctccaagatcaattgatagcatttcaagttctttcataaaaagtaggatacctatcagacaaccataccattactctcaaccaactactgcgccctttcaagctcaggcgaaatttcataaacctgcaaataagttaatcgataatggtaataggagtaatagtaacaataacaatcataatgggaatgatgcagttggtgtgatgcataatgacgaggatgatcaagatgatgatctagtatttttcatgagtgatatgaacctttctaaagaaggttaa

SEQ ID NO: 191209 - DNA, 1290 bp, Saccharomyces pastorianus
atgggaggagaggttctaaataatgaaggaatgccactggccgaacttaaacaggagaccattcccatatcacgatcagagagttcagaatcattgaacagtttaacatcaactagaagctcatcgagcaataggccaaagacatatttctgtgactatgatggctgtgataaggcatttacaagaccttcaattttgactgaacaccaattaagcgtacatcagggtttaagagcatttcagtgtgataagtgtgcaaaatccttcgttaaaaagagtcacttagagagacacttgtatacgcattctgatacgaaaccattccaatgttcttattgtggaaaaggagtgacgactcgccagcaactgaagcgacacgaagtaacgcataccaaatctttcatttgtccagaggaaggatgcaacctccgattctacaagcatccacaattaagggcacatattttatctgttcatttacataaactaacctgtccacactgcaataaaagctttcagaggccatataggctaagaaatcacatttctaaacatcacgatcctgaggtagaaaatccttaccaatgtacttttgctggttgttgcaaagagtttcggatatggtcacaattgcaatcgcatataaaaaatgatcatcctaaattaaaatgtcctatttgtagcaaaccatgtgtgggggaaaatggtttacaaatgcacatgattattcatgacgactcactagtaaccaaaaattggaagtgtcatatatgtcctgatatgtctttttctagaaaacatgatcttctcacgcattatgggtctattcatacggaagaagatatcccactggaactaaaatataaaatttctgatattcaacaacttgtccaagaccacggagttcaactggggaatagcaaacactcgaatgagcaggatgaagagaagatttccaataggttgaggaaaaggagaaaacttaccgaaaacaataatgtagagtttttacagaatgaagtggatttagaaaagcgacttgagtctggtgaaaatgggctaaaccttttattgaataccgttggaagaaaatacagatgcttttacaataattgttctaggactttcaagacaaaggaaaaatacgagaaacatatagacaagcacaaagtacatgagctaaagttaaaaatattacaggaaaaggaagaaaataaaacgctagtggaccagaaccataaggaaccttttataattcaaaaggaaacgcagtcagcgggtgacaaataa

SEQ ID NO: 191210 - DNA, 544 bp, Saccharomyces pastorianus
atgtcagactacgaggaggcgtatgtgcattcatattggagaaattgcgtgctttagttttaattatatttactaacttctatcattgtgatacaggtttaacgacggtaatgagaacttcgaagattttgatgtagagcatttttctgatgaggagacttatgaggaaaaacctcaattcaaggatggtgaaacaaccgatgccaacggtaagaccatcgttactggtggtaatggcccagaagattttcaacagcatgagcaaataagaagaaagacacttaaggaaaaggccatcccaaaagaccaaagagcaactactccatacatgaccaaatatgaaagggcaagaattttaggtacaagagccctacaaatttccatgaatgcgccagtttttgtagatttagaaggtgaaactgatccattgcgtattgccatgaaggagttggctgaaaagaaaattcctttggttattagaagatatttaccagatggttcctttgaggactggagtgtggaggaactcattgtggatttgtga

SEQ ID NO: 191211 - DNA, 492 bp, Saccharomyces pastorianus
atggaccatagtgaatcgctaacgtttaaccaacttacgcaggactacataaataaactcaaagatgctttccaaatgctggatgaggatgaggatggtctgattagtaggggagatcttaccaagatatatgcaacattggggaagacattgacagatgaggaatggtccaaaatggtacctgacaatgacaccagtaccgcggaagttggagaagaaggtgtaagctttcccatattcttatctatcatggggaagaacttatcgcagtttcccgagcgtgaagaattggaagaaagtttaaaagccattggaagaggacacgatttaaacgttcccttgaatgaggtcattgattctttaaaggaagccggttttgaaaatcctgaggaagaatttgctaaacttttcaaattgtttactacaaatcagcaagcgaccgaagagagaactttcagaggtaagcttttcttagattcaatcaccgattaa

SEQ ID NO: 191212 - DNA, 4299 bp, Saccharomyces pastorianus
atgtcggatattaaacagctattgaaggaagccaaacaagaattgacaaatcgtgactatgaagagaccatcgaaatatcggaaaaggttcttaaactagatcccgataattatttcgcacatatttttctagggaaagcactttcgagtcttccagctagtaataatgtcagttcaaatcggaacctggagagagctactaatcattacgtgtccgctgccaaattagttcctgataaccttttagcgtggaaaggactttttctcttatttagaaccactgaggttgtcccagacatactttcgtatgatgaatattttgacctgtgtggccaatatgcagacgcacttttaaagcaggaacagtctcaagtagaactaataaatgacataaaattactaaagaaaacgcatccagattgtcaaaaagccttttatcagcatttgaaacctgggtcgctaatggcggaaactattggtcgtcatctatctacaccccaggacgctttattaaatcttataaagatactgtctaatattgaaacaacggaaataggtaagacccttagtcagaacaggttaaaactaaaagctagtgatcctgattatcaaattaaactaaattcattctcctgggaaataattaaaaattcagaaattgatcagttatacaaccagttggtaaatattctcgctgacgatcaaaagagaagtgaaattgagaaccagtggttagaatatagaatcaaagtgctaaaatcaatgccgctggatgtaaaaaaagattttttcacgaaagttaaggaaatggtcgaggatatggttcttgtgaatcatcaatctttgcttgcatggcaaaagtatttcgaatggacagattacgaagatctggacaacatggatgccccattgataataaagtactttaagaaatttcctaaagatccattggccatgatcctctattcctggctttcctcaaaactatcgaaatatgatattaaaagtttggaatcggctaataaaccacctgaaggccataaaaagacggagaaggaaacagatattaaggatgtagatgagacaaatgaagatgaagttaaagatcgcgttgaagatgaagttaaagatcgtgttgaagatgaagtcaaagatcaagatgaggaggcaaaggaagatgaagaagaagaccttgatgatatagaaattggtttattagaggaagaggttgtcactgtattgacggagaatatcgtaaaatgtaaaaataatatcttagcgcatcgcattctttgtcaatattacctactgaccaaggagtatgaggcagctttaccatacatcaaaaatggtatttctttaattgcctataatataaaggacctgggggtacatttgccattaacaaaaagagaattttctctggatttggctaccgtttatacatatgtcgatgccccaaaggaccacaatgctgcattaaagttatatgataacattttatccggtgattttagtaatatacaagcaaaaatgggcaaaggtataatttttattgaaaggaaaaattggaaggatgctatgacattactaacacaggtgcatgaacaatcgcctaataatctggaagttttatctgaactgtcatggagtaaagcccatatgggttatatggacgaggcattagctggcttagatactgtcatcaagggtatcaaaggtatggatttacgttcgatagatttcagagcattaaacttatggaggcaagccaaagtttacattatgaagcatgcttccattaacgatgctaaacaggaaaacgtcaagtgcgcattcaaattactcattcagagtattaaaatattggacacttttgctcccggattttcgacactgggcgatatttattgccactattataaagaccatttgagggccttcaaatgttatttcaaagctttcgatctggatgcgggggattacacagcagcgaagtatattaccgaaacttatgcaagcaagcccaattggcaagctgcttcttccatcgcttcaagattaattaaaggtgaaaaagcaaaggcagaactgcgctcaaataactggccctttagggtcgtagggattgctcatttggaaaagcaagaagaaagtgattctattgagtggtttcaatctgctttacgtgttgatccaaatgatgtagagtcatgggtgggcctgggacaagcataccacgcgtgtggtcgtatagaagcatctatcaaagtttttgacaaggcaattcaattaaggccctctcatacttttgcccaatactttaaagctatttctctatgtgacgtaggtgaatatcttgaaagtttagacattctggaaaaggtatgtcaagaagccgctacagaagagtcattccaaattggtttagtggaagtgcttatgagatgttccttggatttatattcgcaagggttcttgctcaaatcagtttcaattgcaaaggacactattgaacggatcaagataattatcagtgaattaaaatgtgagaaccaacaggtttggatctacctttcacaagtactgagattatttatttggatagagtcaaaggttgatactttacctgttgaatcactagtatcaatttttgaaaattctcaattttctggtagtgaagaaattgattctgtcgacaatatcaaaatcgatactttactcgatagcactactgatgataatgtgtccattgcgtgcaagtttttgatcttagcttcaaaatatagtgtttcggatcaaaaatttacagatatagcaggaacggtcagggcctcatactggtataatataggtatctcagagcttactgctttcataacattgaaagaaccgcagtatagagatgctgctatttttgcttttaagaaatccattcaattacagtctaatacaagtgaaacttggattggtctagggatagccactatggacatcaactttcgtgtctctcaacattgctttattaaagcaactgctttggaaccgaaggcgacaaatacatggttcaacttggctatgctaggtttaaagaaaaaggatactgaatttgctcaacaggttctgaataaattacaaagccttgccccacaagattcgtcaccttggctaggtatggccttgattcttgaggaacaaggagacattatcggaagttctaaactttttgcacactccttcatattatctaatggaaggtcaaaggctgcgcaatttatgtatgctaaaaatgtccttgagaatcacattaataatggtgacgatgaaagagatattgagacagtggaaaaactaaccactgcttcaatagctttagagcagtttttcaaaaaaagtcctgatagtcaatttgctcttcaatgtgctcttctaactcttgaaaggttacatcactatgaaaatgcaaacgaactggctaatcggttgataggcattttggaaaaaaagtttgagaaaactcaagatgaaagagaactgtttaattttgcgataattaaaggacaattcgctcgtattcacttaggtttaggaaatttcgaactctctattgaaaacgctgatctttctcaaggtattatatctgaatcgagcgacgaaaaatcaatgaaaaccaaaatatccaatcacatttgcttaggattaagttatttcttcttaaacgactttgatcagactttgaaccaattccaagaactgctaagcatttcaaaggattctaagcacctagttgttttaattgcgaaggtgctttatgatgtaggtgaatctgacacaaaggaaattgctttacaggaactaacagaatatatagccacaagcggcgcagacttgttagtaacactaacgattgcagctatgtcaattctagacgataagcgtgaagatttaagcattattttagaagaattgaaagctttgccattatccaaacaaataatagataagcacaaagacgcaccatatctgatagaagaaattactaagagactttatcgtaacgataccggtaaacaagtatggcaaaggagtgcgtactttttccctaataacctcaaggtttgggagagattagataagaatattcaacgaagaatagcttctaatggacaaaataaagttactgcggaggagatgagtaaactatattgtgagagtaagaatttgagaagcatacaaagaggtatgtttttgtgcccttggaacgttactgcagtgaaggcgctaaacgaatgtttctaa

SEQ ID NO: 191213 - DNA, 1965 bp, Saccharomyces pastorianus
atggacgagttactgggagaagcgcttagtgcagagaaccaaacaggtgagagcactgtcgaatctgagaagttggtcacccccgaagatgttatgaccatatcatccttggaacagagaaccttgaatcccgatttgtttctttacaaagagttggtgaaggcacatctgggtgaaagagcagcttctgtaattgggatgttggttgcgctgggcagattgagtgtgcgcgagttagtggagaaaatagatggtatggatgtagacagcgtcaagacgacactagtctcattaactcaattaaggtgtgttaagtacctgcaagaaacagcaatatccgggaaaaaaacgacttattattactataacgaggaagggatacacattttactctactcagggttgattattgacgaaattattacgcaaatgcgtgtaaacgacgaagaggagcataaacagctggtggctgaaattgtacaaaacgttatatcattagggtccttaacagtggaagattatctaagtagtgtcacgtcagattccatgaagtacaccatttcatcactattcgtgcaactgtgtgaaatgggatatcttattcaaatatcaaaattgcattataccccaatcgaagatctctggcaatttttatatgaaaaacattacaaaaatattcccagaaactccccgttgtccgatttgaagaaaagatcccaagccaagatgaatgcgaaaactgattttgccaaaatcataaataaaccaaatgagctttcacaaatcttaacggttgatccaaagacctcattgaggattgttaaacctacagtctctctgacgattaatttggatagatttatgaaaggtagaagatctaaacaattgattaacttggccaagacaagagtcggctccgtcacagctcaagtttacaaaattgcattaagactcacagagcaaaagtctcctaaaattagagatccactaactcaaactgggcttttacaagatttggaggaagcaaaatcgtttcaagacgaagccgaacttgttgaggagaagacaccagggcttacctttaatgctattgacttggcaagacatctccccgcagaattggacttgcgtggaagcttattatctagaaagccctctgacaataaaaagcgttctggctcaaacgctgctgcatcattacccagtaaaaaattaaaaaccgaagatggatttgtgatcccggcgctacctgctgctgtttccaaatctcttcaagaaagtggagatacacaagaagaagacgaagaggaggaggatttggatgcagacactgaggatcctcactcagcttctttgataaatagtcatttaaaaatcctagcatcatcaaatttcccctttttgaacgaaaccaaaccaggtgtttactatgttccatatagcaaactaatgccagtattaaagtcatctgtttatgagtatgttatcgcgtctacgttgggaccctcagcaatgcgtttaagccgttgtattcgtgataacaagctggtgtctgagaaaattatcaactcaactgcgttaatgaaggaaaaggatataagatctacattagcatctttaattagatacaattctgtggaaatccaggaagttccaagaacagccgatagatcagcatcaagggcagtttttttgtttagatgcaaagaaacgcattcctataatttcatgagacaaaacttggaatggaatatggcaaatttactttttaaaaaggagaaattaaagcaagaaaactctacattattaaaaaaggcaaatagagatgatgttaaaggaagagagaacgaactactattaccaagcgaattgaatcaattaaagatggtcaatgaaagagagctaaatgttttcgctcgtttatcgaggttgctatcgctttgggaagttttccaaatggcatga

SEQ ID NO: 191214 - DNA, 25 bp, Saccharomyces pastorianus
gagacactacgttggtgtagcacca

SEQ ID NO: 191215 - DNA, 25 bp, Saccharomyces pastorianus
gaatacgttgcagatgatggcgaag

SEQ ID NO: 191216 - DNA, 25 bp, Saccharomyces pastorianus
attaagggaggaggagagacactac

SEQ ID NO: 191217 - DNA, 25 bp, Saccharomyces pastorianus
atggcgaaggtgaatacgttgacgt

SEQ ID NO: 191218 - DNA, 25 bp, Saccharomyces pastorianus
gtagctgccaagattgaaaaagcca

SEQ ID NO: 191219 - DNA, 25 bp, Saccharomyces pastorianus
aaagtggttagctgactctgacaga

SEQ ID NO: 191220 - DNA, 25 bp, Saccharomyces pastorianus
agaggagaattctcaggacgaggaa

SEQ ID NO: 191221 - DNA, 25 bp, Saccharomyces pastorianus
cagagagacgtttagcattaaggga

SEQ ID NO: 191222 - DNA, 25 bp, Saccharomyces pastorianus
atacgttgacgtggatgacttagaa

SEQ ID NO: 191223 - DNA, 25 bp, Saccharomyces pastorianus
tgacagagaagcttccagcgccagt

SEQ ID NO: 191224 - DNA, 25 bp, Saccharomyces pastorianus
ggtgcttacggtgataaaccattaa

SEQ ID NO: 191225 - DNA, 25 bp, Saccharomyces pastorianus
tcaatctcgtttccaaaaatgcaac

SEQ ID NO: 191226 - DNA, 25 bp, Saccharomyces pastorianus
tcatcgttatgacgacaattggaga

SEQ ID NO: 191227 - DNA, 25 bp, Saccharomyces pastorianus
cgttatgacgacaattggagacaaa

SEQ ID NO: 191228 - DNA, 25 bp, Saccharomyces pastorianus
atgtcaatctcgtttccaaaaatgc

SEQ ID NO: 191229 - DNA, 25 bp, Saccharomyces pastorianus
tcgttatgacgacaattggagacaa

SEQ ID NO: 191230 - DNA, 25 bp, Saccharomyces pastorianus
ctcatcgttatgacgacaattggag

SEQ ID NO: 191231 - DNA, 25 bp, Saccharomyces pastorianus
cctcatcgttatgacgacaattgga

SEQ ID NO: 191232 - DNA, 25 bp, Saccharomyces pastorianus
catcgttatgacgacaattggagac

SEQ ID NO: 191233 - DNA, 25 bp, Saccharomyces pastorianus
gtcaatctcgtttccaaaaatgcaa

SEQ ID NO: 191234 - DNA, 25 bp, Saccharomyces pastorianus
atcgttatgacgacaattggagaca

SEQ ID NO: 191235 - DNA, 25 bp, Saccharomyces pastorianus
tgtcaatctcgtttccaaaaatgca

SEQ ID NO: 191236 - DNA, 25 bp, Saccharomyces pastorianus
taacacagtcagcaccatccaagat

SEQ ID NO: 191237 - DNA, 25 bp, Saccharomyces pastorianus
ggcggtttcaccagacaacataaca

SEQ ID NO: 191238 - DNA, 25 bp, Saccharomyces pastorianus
agtcagcaccatccaagatagcgtt

SEQ ID NO: 191239 - DNA, 25 bp, Saccharomyces pastorianus
gaaacttcagctctggttggtcttg

SEQ ID NO: 191240 - DNA, 25 bp, Saccharomyces pastorianus
gttgtaagtcatggattccaacatt

SEQ ID NO: 191241 - DNA, 25 bp, Saccharomyces pastorianus
tcttgggttgtaagtcatggattcc

SEQ ID NO: 191242 - DNA, 25 bp, Saccharomyces pastorianus
accatccaagatagcgttaccgaca

SEQ ID NO: 191243 - DNA, 25 bp, Saccharomyces pastorianus
gacatcggaaacttcagctctggtt

SEQ ID NO: 191244 - DNA, 25 bp, Saccharomyces pastorianus
acaacataacacagtcagcaccatc

SEQ ID NO: 191245 - DNA, 25 bp, Saccharomyces pastorianus
caagatagcgttaccgacatcggaa

SEQ ID NO: 191246 - DNA, 25 bp, Saccharomyces pastorianus
agctctggttggtcttgggttgtaa

SEQ ID NO: 191247 - DNA, 25 bp, Saccharomyces pastorianus
aaagaaggccgcaattgatttgtat

SEQ ID NO: 191248 - DNA, 25 bp, Saccharomyces pastorianus
aatctttgctcaccaactacagcag

SEQ ID NO: 191249 - DNA, 25 bp, Saccharomyces pastorianus
ttccagggtgatgacctactatcca

SEQ ID NO: 191250 - DNA, 25 bp, Saccharomyces pastorianus
tacaatactactacagaaattcgtt

SEQ ID NO: 191251 - DNA, 25 bp, Saccharomyces pastorianus
agtagcaacaaagaaggccgcaatt

SEQ ID NO: 191252 - DNA, 25 bp, Saccharomyces pastorianus
tatacccagtatttcaggaactcta

SEQ ID NO: 191253 - DNA, 25 bp, Saccharomyces pastorianus
cttatttccagggtgatgacctact

SEQ ID NO: 191254 - DNA, 25 bp, Saccharomyces pastorianus
gtagtcgtgaatctttgctcaccaa

SEQ ID NO: 191255 - DNA, 25 bp, Saccharomyces pastorianus
aactctaattcggtagtcgtgaatc

SEQ ID NO: 191256 - DNA, 25 bp, Saccharomyces pastorianus
gttggacagtacttgcagatgggca

SEQ ID NO: 191257 - DNA, 25 bp, Saccharomyces pastorianus
gaaattcgttggacagtacttgcag

SEQ ID NO: 191258 - DNA, 25 bp, Saccharomyces pastorianus
aaaatttggcgaatgctttgataac

SEQ ID NO: 191259 - DNA, 25 bp, Saccharomyces pastorianus
ttcagattagattccggccatattt

SEQ ID NO: 191260 - DNA, 25 bp, Saccharomyces pastorianus
gattccggccatatttctgacattt

SEQ ID NO: 191261 - DNA, 25 bp, Saccharomyces pastorianus
aaaagggaaattcatatctctatgt

SEQ ID NO: 191262 - DNA, 25 bp, Saccharomyces pastorianus
gctcatcataaacattaatcattgg

SEQ ID NO: 191263 - DNA, 25 bp, Saccharomyces pastorianus
ggcgaatgctttgataactgctgat

SEQ ID NO: 191264 - DNA, 25 bp, Saccharomyces pastorianus
atgctttgataactgctgatatttc

SEQ ID NO: 191265 - DNA, 25 bp, Saccharomyces pastorianus
cctcgcacagttttgctcatcataa

SEQ ID NO: 191266 - DNA, 25 bp, Saccharomyces pastorianus
ggccatatttctgacatttgtttta

SEQ ID NO: 191267 - DNA, 25 bp, Saccharomyces pastorianus
atgtgccctcgcacagttttgctca

SEQ ID NO: 191268 - DNA, 25 bp, Saccharomyces pastorianus
taactttcagattagattccggcca

SEQ ID NO: 191269 - DNA, 25 bp, Saccharomyces pastorianus
atacactgccagttagcgtggaatt

SEQ ID NO: 191270 - DNA, 25 bp, Saccharomyces pastorianus
ttttgcagggcacgtttactctttt

SEQ ID NO: 191271 - DNA, 25 bp, Saccharomyces pastorianus
ttagcgatgattttgcagggcacgt

SEQ ID NO: 191272 - DNA, 25 bp, Saccharomyces pastorianus
ctatcagtcggtggcgacgttgcat

SEQ ID NO: 191273 - DNA, 25 bp, Saccharomyces pastorianus
acgttgcattcggatgctgtgcaca

SEQ ID NO: 191274 - DNA, 25 bp, Saccharomyces pastorianus
gatgttactactgttagcgatgatt

SEQ ID NO: 191275 - DNA, 25 bp, Saccharomyces pastorianus
gaagattgtctactcaaacgctgtt

SEQ ID NO: 191276 - DNA, 25 bp, Saccharomyces pastorianus
cctccaattacatccacaaacttta

SEQ ID NO: 191277 - DNA, 25 bp, Saccharomyces pastorianus
gatgctgtgcacaagagcaacctcc

SEQ ID NO: 191278 - DNA, 25 bp, Saccharomyces pastorianus
gaagattgcccgataacattgcagg

SEQ ID NO: 191279 - DNA, 25 bp, Saccharomyces pastorianus
aaacgctgtttcttggcatacactg

SEQ ID NO: 191280 - DNA, 25 bp, Saccharomyces pastorianus
catgttaccaagtcgagacgcttaa

SEQ ID NO: 191281 - DNA, 25 bp, Saccharomyces pastorianus
tccggttccccatattcagattgga

SEQ ID NO: 191282 - DNA, 25 bp, Saccharomyces pastorianus
tgtaatcttttaacgctgctcttca

SEQ ID NO: 191283 - DNA, 25 bp, Saccharomyces pastorianus
gatatactgcaacttttcggccttt

SEQ ID NO: 191284 - DNA, 25 bp, Saccharomyces pastorianus
gtcaaagacagattccggttcccca

SEQ ID NO: 191285 - DNA, 25 bp, Saccharomyces pastorianus
atgaatccttttgcatcgctagaag

SEQ ID NO: 191286 - DNA, 25 bp, Saccharomyces pastorianus
gctgctcttcaaatcacggacgcaa

SEQ ID NO: 191287 - DNA, 25 bp, Saccharomyces pastorianus
tgtcggccaagacacgcaaaatctt

SEQ ID NO: 191288 - DNA, 25 bp, Saccharomyces pastorianus
aaacttttggcaactcatgttacca

SEQ ID NO: 191289 - DNA, 25 bp, Saccharomyces pastorianus
ttcggcctttgcaacgatttgtaat

SEQ ID NO: 191290 - DNA, 25 bp, Saccharomyces pastorianus
cggacgcaatcagtacttgtaccta

SEQ ID NO: 191291 - DNA, 25 bp, Saccharomyces pastorianus
gaaaacagtagtcacctcttcaatt

SEQ ID NO: 191292 - DNA, 25 bp, Saccharomyces pastorianus
cataataggatctagtactgcctct

SEQ ID NO: 191293 - DNA, 25 bp, Saccharomyces pastorianus
ccagtactggagctgctgagacgaa

SEQ ID NO: 191294 - DNA, 25 bp, Saccharomyces pastorianus
gtactggagctgctgagacgaaaac

SEQ ID NO: 191295 - DNA, 25 bp, Saccharomyces pastorianus
taccagtactggagctgctgagacg

SEQ ID NO: 191296 - DNA, 25 bp, Saccharomyces pastorianus
agctgctgagacaactaccagtact

SEQ ID NO: 191297 - DNA, 25 bp, Saccharomyces pastorianus
acgaaaacagtagtcacctcttcaa

SEQ ID NO: 191298 - DNA, 25 bp, Saccharomyces pastorianus
atactggagctgctgagacaactac

SEQ ID NO: 191299 - DNA, 25 bp, Saccharomyces pastorianus
ggagctgctgagacaactaccagta

SEQ ID NO: 191300 - DNA, 25 bp, Saccharomyces pastorianus
tggagctgctgagacgaaaacagta

SEQ ID NO: 191301 - DNA, 25 bp, Saccharomyces pastorianus
tggagctgctgagacaactaccagt

SEQ ID NO: 191302 - DNA, 25 bp, Saccharomyces pastorianus
tacagaaaaatccccacaaaaatca

SEQ ID NO: 191303 - DNA, 25 bp, Saccharomyces pastorianus
taccactccatttatatacacttat

SEQ ID NO: 191304 - DNA, 25 bp, Saccharomyces pastorianus
tacttaccactccatttatatacac

SEQ ID NO: 191305 - DNA, 25 bp, Saccharomyces pastorianus
ataccacttttgcaccatatactta

SEQ ID NO: 191306 - DNA, 25 bp, Saccharomyces pastorianus
catatacttaccactccatttatat

SEQ ID NO: 191307 - DNA, 25 bp, Saccharomyces pastorianus
atacttaccactccatttatataca

SEQ ID NO: 191308 - DNA, 25 bp, Saccharomyces pastorianus
ttaccactccatttatatacactta

SEQ ID NO: 191309 - DNA, 25 bp, Saccharomyces pastorianus
cttaccactccatttatatacactt

SEQ ID NO: 191310 - DNA, 25 bp, Saccharomyces pastorianus
atatacttaccactccatttatata

SEQ ID NO: 191311 - DNA, 25 bp, Saccharomyces pastorianus
tatacttaccactccatttatatac

SEQ ID NO: 191312 - DNA, 25 bp, Saccharomyces pastorianus
acttaccactccatttatatacact

SEQ ID NO: 191313 - DNA, 25 bp, Saccharomyces pastorianus
aaataacacacacgtgcttacccta

SEQ ID NO: 191314 - DNA, 25 bp, Saccharomyces pastorianus
tatactgattttacgtacgcacacg

SEQ ID NO: 191315 - DNA, 25 bp, Saccharomyces pastorianus
gtgcttaccctaccactttatacca

SEQ ID NO: 191316 - DNA, 25 bp, Saccharomyces pastorianus
tactgattttacgtacgcacacgga

SEQ ID NO: 191317 - DNA, 25 bp, Saccharomyces pastorianus
acttgtatactgattttacgtacgc

SEQ ID NO: 191318 - DNA, 25 bp, Saccharomyces pastorianus
taccactttataccaccaccacatg

SEQ ID NO: 191319 - DNA, 25 bp, Saccharomyces pastorianus
actgattttacgtacgcacacggat

SEQ ID NO: 191320 - DNA, 25 bp, Saccharomyces pastorianus
tgattttacgtacgcacacggatgc

SEQ ID NO: 191321 - DNA, 25 bp, Saccharomyces pastorianus
tctcagattccacttcactccatgg

SEQ ID NO: 191322 - DNA, 25 bp, Saccharomyces pastorianus
gtatactgattttacgtacgcacac

SEQ ID NO: 191323 - DNA, 25 bp, Saccharomyces pastorianus
cacgtgcttaccctaccactttata

SEQ ID NO: 191324 - DNA, 25 bp, Saccharomyces pastorianus
aaataatctaagttacctgatacaa

SEQ ID NO: 191325 - DNA, 25 bp, Saccharomyces pastorianus
atctaagttacctgatacaagaact

SEQ ID NO: 191326 - DNA, 25 bp, Saccharomyces pastorianus
ttattaaataatctaagttacctga

SEQ ID NO: 191327 - DNA, 25 bp, Saccharomyces pastorianus
taatctaagttacctgatacaagaa

SEQ ID NO: 191328 - DNA, 25 bp, Saccharomyces pastorianus
ataatctaagttacctgatacaaga

SEQ ID NO: 191329 - DNA, 25 bp, Saccharomyces pastorianus
tattaaataatctaagttacctgat

SEQ ID NO: 191330 - DNA, 25 bp, Saccharomyces pastorianus
aataatctaagttacctgatacaag

SEQ ID NO: 191331 - DNA, 25 bp, Saccharomyces pastorianus
ttaaataatctaagttacctgatac

SEQ ID NO: 191332 - DNA, 25 bp, Saccharomyces pastorianus
attaaataatctaagttacctgata

SEQ ID NO: 191333 - DNA, 25 bp, Saccharomyces pastorianus
taaataatctaagttacctgataca

SEQ ID NO: 191334 - DNA, 25 bp, Saccharomyces pastorianus
aatctaagttacctgatacaagaac

SEQ ID NO: 191335 - DNA, 25 bp, Saccharomyces pastorianus
cgaaatcgaaaacagccagggctca

SEQ ID NO: 191336 - DNA, 25 bp, Saccharomyces pastorianus
cattgtgaccctggcaaatttgcaa

SEQ ID NO: 191337 - DNA, 25 bp, Saccharomyces pastorianus
gaactgttcttagatatccatgcta

SEQ ID NO: 191338 - DNA, 25 bp, Saccharomyces pastorianus
tgggtcaaagacatcctatccgttg

SEQ ID NO: 191339 - DNA, 25 bp, Saccharomyces pastorianus
ttcctacctacctgggtcaaagaca

SEQ ID NO: 191340 - DNA, 25 bp, Saccharomyces pastorianus
atgacagtcgctgaactgttcttag

SEQ ID NO: 191341 - DNA, 25 bp, Saccharomyces pastorianus
ggcaaacgacattgtgaccctggca

SEQ ID NO: 191342 - DNA, 25 bp, Saccharomyces pastorianus
taactctcccagcacggacaacgat

SEQ ID NO: 191343 - DNA, 25 bp, Saccharomyces pastorianus
gctacacacgtcatcgacatctaaa

SEQ ID NO: 191344 - DNA, 25 bp, Saccharomyces pastorianus
caaagttatagctcggaatcctcaa

SEQ ID NO: 191345 - DNA, 25 bp, Saccharomyces pastorianus
agaagaatgattctcgcagctatac

SEQ ID NO: 191346 - DNA, 25 bp, Saccharomyces pastorianus
gcagcaaccactacattatctcaat

SEQ ID NO: 191347 - DNA, 25 bp, Saccharomyces pastorianus
cagcaaccactacattatctcaatc

SEQ ID NO: 191348 - DNA, 25 bp, Saccharomyces pastorianus
actacattatctcaatctgacgaaa

SEQ ID NO: 191349 - DNA, 25 bp, Saccharomyces pastorianus
agcaaccactacattatctcaatct

SEQ ID NO: 191350 - DNA, 25 bp, Saccharomyces pastorianus
gcaaccactacattatctcaatctg

SEQ ID NO: 191351 - DNA, 25 bp, Saccharomyces pastorianus
attaggtgtttatgtttccgatatc

SEQ ID NO: 191352 - DNA, 25 bp, Saccharomyces pastorianus
aaccactacattatctcaatctgac

SEQ ID NO: 191353 - DNA, 25 bp, Saccharomyces pastorianus
attgctgctggtgcctccgccgcag

SEQ ID NO: 191354 - DNA, 25 bp, Saccharomyces pastorianus
gctgctggtgcctccgccgcagcaa

SEQ ID NO: 191355 - DNA, 25 bp, Saccharomyces pastorianus
gaattaggtgtttatgtttccgata

SEQ ID NO: 191356 - DNA, 25 bp, Saccharomyces pastorianus
taggtgtttatgtttccgatatcag

SEQ ID NO: 191357 - DNA, 25 bp, Saccharomyces pastorianus
gggtctcaactacaaacaccacttt

SEQ ID NO: 191358 - DNA, 25 bp, Saccharomyces pastorianus
agtcccgcggtgatatcgtagcctt

SEQ ID NO: 191359 - DNA, 25 bp, Saccharomyces pastorianus
gaaatcgtccatcattgggtctcaa

SEQ ID NO: 191360 - DNA, 25 bp, Saccharomyces pastorianus
gagaccgcccaggaattcagaacag

SEQ ID NO: 191361 - DNA, 25 bp, Saccharomyces pastorianus
tatggacccggagactggcgatacc

SEQ ID NO: 191362 - DNA, 25 bp, Saccharomyces pastorianus
gataccgttctgcacgaattcgtca

SEQ ID NO: 191363 - DNA, 25 bp, Saccharomyces pastorianus
aactgcccatcgagctcgttaggaa

SEQ ID NO: 191364 - DNA, 25 bp, Saccharomyces pastorianus
atcaacgactgcgtgctcaacaact

SEQ ID NO: 191365 - DNA, 25 bp, Saccharomyces pastorianus
gaacagcttttaacaacagggactt

SEQ ID NO: 191366 - DNA, 25 bp, Saccharomyces pastorianus
tgatctaaacgaacgggactccaac

SEQ ID NO: 191367 - DNA, 25 bp, Saccharomyces pastorianus
acaccacttttctaaacatccatct

SEQ ID NO: 191368 - DNA, 25 bp, Saccharomyces pastorianus
aaataaagcgtttcctgtataggca

SEQ ID NO: 191369 - DNA, 25 bp, Saccharomyces pastorianus
ttgagccaaataaagcgtttcctgt

SEQ ID NO: 191370 - DNA, 25 bp, Saccharomyces pastorianus
gtttcttttattgccaacttcagac

SEQ ID NO: 191371 - DNA, 25 bp, Saccharomyces pastorianus
tgtcagttgtgacgctagacttttc

SEQ ID NO: 191372 - DNA, 25 bp, Saccharomyces pastorianus
gttttctgtgtttcccatatcataa

SEQ ID NO: 191373 - DNA, 25 bp, Saccharomyces pastorianus
gtttagtggctcttcttagtttctt

SEQ ID NO: 191374 - DNA, 25 bp, Saccharomyces pastorianus
aacatgatcatattattgagccaaa

SEQ ID NO: 191375 - DNA, 25 bp, Saccharomyces pastorianus
caaaatttttggagtgttttctgtg

SEQ ID NO: 191376 - DNA, 25 bp, Saccharomyces pastorianus
aacctcgcctctttctttgttctat

SEQ ID NO: 191377 - DNA, 25 bp, Saccharomyces pastorianus
gacgctagacttttcaatgaactct

SEQ ID NO: 191378 - DNA, 25 bp, Saccharomyces pastorianus
gccaacttcagacaaacatgatcat

SEQ ID NO: 191379 - DNA, 25 bp, Saccharomyces pastorianus
gtagaaatctgctgcacatgccaca

SEQ ID NO: 191380 - DNA, 25 bp, Saccharomyces pastorianus
ccatcgccaacttttgctttaacaa

SEQ ID NO: 191381 - DNA, 25 bp, Saccharomyces pastorianus
aatgccctattttctttagcaatta

SEQ ID NO: 191382 - DNA, 25 bp, Saccharomyces pastorianus
gtatgttaatcttccttgttctttt

SEQ ID NO: 191383 - DNA, 25 bp, Saccharomyces pastorianus
agtgtggttcgcttaggatgttttc

SEQ ID NO: 191384 - DNA, 25 bp, Saccharomyces pastorianus
gcaattaatgaaccatcgccaactt

SEQ ID NO: 191385 - DNA, 25 bp, Saccharomyces pastorianus
gccattttcagcagtactaacgtaa

SEQ ID NO: 191386 - DNA, 25 bp, Saccharomyces pastorianus
atgccacacgcagtacttgaaactt

SEQ ID NO: 191387 - DNA, 25 bp, Saccharomyces pastorianus
acgtaagatctagtgtggttcgctt

SEQ ID NO: 191388 - DNA, 25 bp, Saccharomyces pastorianus
aacaattattgccattttcagcagt

SEQ ID NO: 191389 - DNA, 25 bp, Saccharomyces pastorianus
cgcttaggatgttttcgagtagaaa

SEQ ID NO: 191390 - DNA, 25 bp, Saccharomyces pastorianus
attaataggtatctcgtctagcgta

SEQ ID NO: 191391 - DNA, 25 bp, Saccharomyces pastorianus
gcagccaaaaatcaaaatacttcag

SEQ ID NO: 191392 - DNA, 25 bp, Saccharomyces pastorianus
gaaagctgccaggaactgttcctga

SEQ ID NO: 191393 - DNA, 25 bp, Saccharomyces pastorianus
aaaaatctcgtgaggcctccggaat

SEQ ID NO: 191394 - DNA, 25 bp, Saccharomyces pastorianus
aggactgctacgtggaagcggattt

SEQ ID NO: 191395 - DNA, 25 bp, Saccharomyces pastorianus
aaaaccgatgtcaaaaaatctcgtg

SEQ ID NO: 191396 - DNA, 25 bp, Saccharomyces pastorianus
gaaggagccgaaagctgccaggaac

SEQ ID NO: 191397 - DNA, 25 bp, Saccharomyces pastorianus
gaagaagtcgtagcgaggactgcta

SEQ ID NO: 191398 - DNA, 25 bp, Saccharomyces pastorianus
gcctccggaattttgacgctgcaag

SEQ ID NO: 191399 - DNA, 25 bp, Saccharomyces pastorianus
atttgaagatcctttccagaacaag

SEQ ID NO: 191400 - DNA, 25 bp, Saccharomyces pastorianus
tgcaagtcaatctacgggaaagaag

SEQ ID NO: 191401 - DNA, 25 bp, Saccharomyces pastorianus
tttatttttggcactcttcacctac

SEQ ID NO: 191402 - DNA, 25 bp, Saccharomyces pastorianus
actatttatttttggcactcttcac

SEQ ID NO: 191403 - DNA, 25 bp, Saccharomyces pastorianus
atcactatttatttttggcactctt

SEQ ID NO: 191404 - DNA, 25 bp, Saccharomyces pastorianus
tggccacgtccaatgttgtttcagg

SEQ ID NO: 191405 - DNA, 25 bp, Saccharomyces pastorianus
caatgttgtttcaggaagtacacaa

SEQ ID NO: 191406 - DNA, 25 bp, Saccharomyces pastorianus
gtccaatgttgtttcaggaagtaca

SEQ ID NO: 191407 - DNA, 25 bp, Saccharomyces pastorianus
atgccttatcactatttatttttgg

SEQ ID NO: 191408 - DNA, 25 bp, Saccharomyces pastorianus
gccacgtccaatgttgtttcaggaa

SEQ ID NO: 191409 - DNA, 25 bp, Saccharomyces pastorianus
tacctggccacgtccaatgttgttt

SEQ ID NO: 191410 - DNA, 25 bp, Saccharomyces pastorianus
tttttggcactcttcacctacctgg

SEQ ID NO: 191411 - DNA, 25 bp, Saccharomyces pastorianus
tatttttggcactcttcacctacct

SEQ ID NO: 191412 - DNA, 25 bp, Saccharomyces pastorianus
acctccaattacatcgacggatttt

SEQ ID NO: 191413 - DNA, 25 bp, Saccharomyces pastorianus
gcctgataacatcggagggactgtc

SEQ ID NO: 191414 - DNA, 25 bp, Saccharomyces pastorianus
ctgtggactggtacttttacttcta

SEQ ID NO: 191415 - DNA, 25 bp, Saccharomyces pastorianus
aaacatactactagcatcgtcacaa

SEQ ID NO: 191416 - DNA, 25 bp, Saccharomyces pastorianus
atcgacggattttacaatcaatggt

SEQ ID NO: 191417 - DNA, 25 bp, Saccharomyces pastorianus
cgaactgtggactggtacttttact

SEQ ID NO: 191418 - DNA, 25 bp, Saccharomyces pastorianus
ctatcagtcggtggtaacgttgcgt

SEQ ID NO: 191419 - DNA, 25 bp, Saccharomyces pastorianus
gcaaggaagtttgcctgataacatc

SEQ ID NO: 191420 - DNA, 25 bp, Saccharomyces pastorianus
attacatcgacggattttacaatca

SEQ ID NO: 191421 - DNA, 25 bp, Saccharomyces pastorianus
gtttgcctgataacatcggagggac

SEQ ID NO: 191422 - DNA, 25 bp, Saccharomyces pastorianus
gaagtttgcctgataacatcggagg

SEQ ID NO: 191423 - DNA, 25 bp, Saccharomyces pastorianus
acccattagcgtccaaatctgccaa

SEQ ID NO: 191424 - DNA, 25 bp, Saccharomyces pastorianus
ctatggacgctgataaagaaagact

SEQ ID NO: 191425 - DNA, 25 bp, Saccharomyces pastorianus
ttagcgtccaaatctgccaacacca

SEQ ID NO: 191426 - DNA, 25 bp, Saccharomyces pastorianus
tattgggactatggacgctgataaa

SEQ ID NO: 191427 - DNA, 25 bp, Saccharomyces pastorianus
gtccaaatctgccaacaccaagcaa

SEQ ID NO: 191428 - DNA, 25 bp, Saccharomyces pastorianus
attggtatgggaactggctctattt

SEQ ID NO: 191429 - DNA, 25 bp, Saccharomyces pastorianus
tgggaactggctctatttgtattac

SEQ ID NO: 191430 - DNA, 25 bp, Saccharomyces pastorianus
aactggctctatttgtattacccaa

SEQ ID NO: 191431 - DNA, 25 bp, Saccharomyces pastorianus
atcacattatcagaaggtaacgaaa

SEQ ID NO: 191432 - DNA, 25 bp, Saccharomyces pastorianus
tgatgaaaagggtaacttagtttct

SEQ ID NO: 191433 - DNA, 25 bp, Saccharomyces pastorianus
gactaagattattggtaaaagctgg

SEQ ID NO: 191434 - DNA, 25 bp, Saccharomyces pastorianus
gaattccctttgatacaagaaaact

SEQ ID NO: 191435 - DNA, 25 bp, Saccharomyces pastorianus
ccctgtttattgtgtttccactcag

SEQ ID NO: 191436 - DNA, 25 bp, Saccharomyces pastorianus
atcggaattccctttgatacaagaa

SEQ ID NO: 191437 - DNA, 25 bp, Saccharomyces pastorianus
tacccctgtttattgtgtttccact

SEQ ID NO: 191438 - DNA, 25 bp, Saccharomyces pastorianus
cgggtatcgtacatcaatttttgaa

SEQ ID NO: 191439 - DNA, 25 bp, Saccharomyces pastorianus
tgtttattgtgtttccactcagtta

SEQ ID NO: 191440 - DNA, 25 bp, Saccharomyces pastorianus
taacgggtatcgtacatcaattttt

SEQ ID NO: 191441 - DNA, 25 bp, Saccharomyces pastorianus
gatttacatcggaattccctttgat

SEQ ID NO: 191442 - DNA, 25 bp, Saccharomyces pastorianus
agactttagttgaccaagaagtggt

SEQ ID NO: 191443 - DNA, 25 bp, Saccharomyces pastorianus
tttttcaagactttagttgaccaag

SEQ ID NO: 191444 - DNA, 25 bp, Saccharomyces pastorianus
aatgatttacatcggaattcccttt

SEQ ID NO: 191445 - DNA, 25 bp, Saccharomyces pastorianus
ttttcacagggctaacttgcgtact

SEQ ID NO: 191446 - DNA, 25 bp, Saccharomyces pastorianus
aatgaagcaactttactaacatcaa

SEQ ID NO: 191447 - DNA, 25 bp, Saccharomyces pastorianus
cacagggctaacttgcgtactcaaa

SEQ ID NO: 191448 - DNA, 25 bp, Saccharomyces pastorianus
tcacagggctaacttgcgtactcaa

SEQ ID NO: 191449 - DNA, 25 bp, Saccharomyces pastorianus
ccaagccaactctagaaatgccatt

SEQ ID NO: 191450 - DNA, 25 bp, Saccharomyces pastorianus
gcccaagccaactctagaaatgcca

SEQ ID NO: 191451 - DNA, 25 bp, Saccharomyces pastorianus
aactttactaacatcaatatgcaaa

SEQ ID NO: 191452 - DNA, 25 bp, Saccharomyces pastorianus
gaagcaactttactaacatcaatat

SEQ ID NO: 191453 - DNA, 25 bp, Saccharomyces pastorianus
aattgcccaagccaactctagaaat

SEQ ID NO: 191454 - DNA, 25 bp, Saccharomyces pastorianus
ttgcccaagccaactctagaaatgc

SEQ ID NO: 191455 - DNA, 25 bp, Saccharomyces pastorianus
ttcacagggctaacttgcgtactca

SEQ ID NO: 191456 - DNA, 25 bp, Saccharomyces pastorianus
ttcaagacccaaacgttgtacgctt

SEQ ID NO: 191457 - DNA, 25 bp, Saccharomyces pastorianus
ggtatccctatacaatgctctaatg

SEQ ID NO: 191458 - DNA, 25 bp, Saccharomyces pastorianus
ttgacttttcactgggtatccctat

SEQ ID NO: 191459 - DNA, 25 bp, Saccharomyces pastorianus
gtacgctttggttttcataacacga

SEQ ID NO: 191460 - DNA, 25 bp, Saccharomyces pastorianus
aagaaccaacaccattgcgtataat

SEQ ID NO: 191461 - DNA, 25 bp, Saccharomyces pastorianus
accagtatactgatcctgattcata

SEQ ID NO: 191462 - DNA, 25 bp, Saccharomyces pastorianus
taccgcttacattgtagtgctatta

SEQ ID NO: 191463 - DNA, 25 bp, Saccharomyces pastorianus
acctcaattgtacatgctatctaag

SEQ ID NO: 191464 - DNA, 25 bp, Saccharomyces pastorianus
gcatgatacctttaagatccagcat

SEQ ID NO: 191465 - DNA, 25 bp, Saccharomyces pastorianus
gatacttggatctcttgacttttca

SEQ ID NO: 191466 - DNA, 25 bp, Saccharomyces pastorianus
atttttcattgtatctaccgcttac

SEQ ID NO: 191467 - DNA, 25 bp, Saccharomyces pastorianus
gatccgaatgcaaagacggcttccg

SEQ ID NO: 191468 - DNA, 25 bp, Saccharomyces pastorianus
gacggcttccgccaataatgattgg

SEQ ID NO: 191469 - DNA, 25 bp, Saccharomyces pastorianus
acacacattactattttgatccgaa

SEQ ID NO: 191470 - DNA, 25 bp, Saccharomyces pastorianus
acaaagtttatgactggaaagacca

SEQ ID NO: 191471 - DNA, 25 bp, Saccharomyces pastorianus
ggtcatataactacacacattacta

SEQ ID NO: 191472 - DNA, 25 bp, Saccharomyces pastorianus
tgcaaagacggcttccgccaataat

SEQ ID NO: 191473 - DNA, 25 bp, Saccharomyces pastorianus
ggcttccgccaataatgattggatt

SEQ ID NO: 191474 - DNA, 25 bp, Saccharomyces pastorianus
cggtactgtaaaatgtgtcgtcgac

SEQ ID NO: 191475 - DNA, 25 bp, Saccharomyces pastorianus
tgtgtcgtcgacaaagtttatgact

SEQ ID NO: 191476 - DNA, 25 bp, Saccharomyces pastorianus
ttcttatatggccactcaacgtgcc

SEQ ID NO: 191477 - DNA, 25 bp, Saccharomyces pastorianus
tatggccactcaacgtgcccaagga

SEQ ID NO: 191478 - DNA, 25 bp, Saccharomyces pastorianus
aaccaaccatattacaagtcacaaa

SEQ ID NO: 191479 - DNA, 25 bp, Saccharomyces pastorianus
gtaaccaaccatattacaagtcaca

SEQ ID NO: 191480 - DNA, 25 bp, Saccharomyces pastorianus
tggtaaccaaccatattacaagtca

SEQ ID NO: 191481 - DNA, 25 bp, Saccharomyces pastorianus
atggtaaccaaccatattacaagtc

SEQ ID NO: 191482 - DNA, 25 bp, Saccharomyces pastorianus
tatggtaaccaaccatattacaagt

SEQ ID NO: 191483 - DNA, 25 bp, Saccharomyces pastorianus
accaaccatattacaagtcacaaat

SEQ ID NO: 191484 - DNA, 25 bp, Saccharomyces pastorianus
ggtaaccaaccatattacaagtcac

SEQ ID NO: 191485 - DNA, 25 bp, Saccharomyces pastorianus
taaccaaccatattacaagtcacaa

SEQ ID NO: 191486 - DNA, 25 bp, Saccharomyces pastorianus
cagattaaagccagccatctccagt

SEQ ID NO: 191487 - DNA, 25 bp, Saccharomyces pastorianus
aaagccagccatctccagtgctcta

SEQ ID NO: 191488 - DNA, 25 bp, Saccharomyces pastorianus
aagccagccatctccagtgctctat

SEQ ID NO: 191489 - DNA, 25 bp, Saccharomyces pastorianus
agattaaagccagccatctccagtg

SEQ ID NO: 191490 - DNA, 25 bp, Saccharomyces pastorianus
attaaagccagccatctccagtgct

SEQ ID NO: 191491 - DNA, 25 bp, Saccharomyces pastorianus
gattaaagccagccatctccagtgc

SEQ ID NO: 191492 - DNA, 25 bp, Saccharomyces pastorianus
tgaccagaatgatcaccggtgttcc

SEQ ID NO: 191493 - DNA, 25 bp, Saccharomyces pastorianus
taaagccagccatctccagtgctct

SEQ ID NO: 191494 - DNA, 25 bp, Saccharomyces pastorianus
tggtattgccccagaccaagtgacc

SEQ ID NO: 191495 - DNA, 25 bp, Saccharomyces pastorianus
ttaaagccagccatctccagtgctc

SEQ ID NO: 191496 - DNA, 25 bp, Saccharomyces pastorianus
agtgaccagaatgatcaccggtgtt

SEQ ID NO: 191497 - DNA, 25 bp, Saccharomyces pastorianus
gacatatatatataccctaacacta

SEQ ID NO: 191498 - DNA, 25 bp, Saccharomyces pastorianus
ccaattagccatattcaacttcact

SEQ ID NO: 191499 - DNA, 25 bp, Saccharomyces pastorianus
gccatattcaacttcactaccactt

SEQ ID NO: 191500 - DNA, 25 bp, Saccharomyces pastorianus
catatatatataccctaacactacc

SEQ ID NO: 191501 - DNA, 25 bp, Saccharomyces pastorianus
taccacttaccctgccattactcta

SEQ ID NO: 191502 - DNA, 25 bp, Saccharomyces pastorianus
tagccatattcaacttcactaccac

SEQ ID NO: 191503 - DNA, 25 bp, Saccharomyces pastorianus
ttactctaccatccaccatctgcta

SEQ ID NO: 191504 - DNA, 25 bp, Saccharomyces pastorianus
tacttactaccaccaatcaaccgtc

SEQ ID NO: 191505 - DNA, 25 bp, Saccharomyces pastorianus
ctatttcaacccttccaacctgtct

SEQ ID NO: 191506 - DNA, 25 bp, Saccharomyces pastorianus
ttgttaccctgtcccattcaaccat

SEQ ID NO: 191507 - DNA, 25 bp, Saccharomyces pastorianus
cctccaattagccatattcaacttc

SEQ ID NO: 191508 - DNA, 25 bp, Saccharomyces pastorianus
aattaccaccgattaaggaaggctg

SEQ ID NO: 191509 - DNA, 25 bp, Saccharomyces pastorianus
tcgtaagggtgaattaccaccgatt

SEQ ID NO: 191510 - DNA, 25 bp, Saccharomyces pastorianus
gaaaaaaagggccagcatgttggat

SEQ ID NO: 191511 - DNA, 25 bp, Saccharomyces pastorianus
taagggtgaattaccaccgattaag

SEQ ID NO: 191512 - DNA, 25 bp, Saccharomyces pastorianus
aaaaaaagggccagcatgttggatg

SEQ ID NO: 191513 - DNA, 25 bp, Saccharomyces pastorianus
tgaattaccaccgattaaggaaggc

SEQ ID NO: 191514 - DNA, 25 bp, Saccharomyces pastorianus
gaaaggaaaaaaagggccagcatgt

SEQ ID NO: 191515 - DNA, 25 bp, Saccharomyces pastorianus
atcgtaagggtgaattaccaccgat

SEQ ID NO: 191516 - DNA, 25 bp, Saccharomyces pastorianus
aggaaaaaaagggccagcatgttgg

SEQ ID NO: 191517 - DNA, 25 bp, Saccharomyces pastorianus
aaggaaaaaaagggccagcatgttg

SEQ ID NO: 191518 - DNA, 25 bp, Saccharomyces pastorianus
gaattaccaccgattaaggaaggct

SEQ ID NO: 191519 - DNA, 25 bp, Saccharomyces pastorianus
gcgctaaaacgcttttctattggaa

SEQ ID NO: 191520 - DNA, 25 bp, Saccharomyces pastorianus
tttctattagtttcacccgttgtgg

SEQ ID NO: 191521 - DNA, 25 bp, Saccharomyces pastorianus
gtggccattggcttgtatttaattt

SEQ ID NO: 191522 - DNA, 25 bp, Saccharomyces pastorianus
caaacgccggcttgttattttgatt

SEQ ID NO: 191523 - DNA, 25 bp, Saccharomyces pastorianus
gaggctgggatgtcgcattctacaa

SEQ ID NO: 191524 - DNA, 25 bp, Saccharomyces pastorianus
gtggcttctaattcattggatacag

SEQ ID NO: 191525 - DNA, 25 bp, Saccharomyces pastorianus
ttgatcactcatggtctaatttaac

SEQ ID NO: 191526 - DNA, 25 bp, Saccharomyces pastorianus
atatgctacatacttccttacaatt

SEQ ID NO: 191527 - DNA, 25 bp, Saccharomyces pastorianus
ggtaactctatctaccagcaaggtt

SEQ ID NO: 191528 - DNA, 25 bp, Saccharomyces pastorianus
tggatacagctgaccaaacgccggc

SEQ ID NO: 191529 - DNA, 25 bp, Saccharomyces pastorianus
ggtaaagctgtactgttccgaactt

SEQ ID NO: 191530 - DNA, 25 bp, Saccharomyces pastorianus
cttccataagtcctggtacgttcct

SEQ ID NO: 191531 - DNA, 25 bp, Saccharomyces pastorianus
attcatgggcaacaccttccataag

SEQ ID NO: 191532 - DNA, 25 bp, Saccharomyces pastorianus
gccaggacctggtatcgttttacca

SEQ ID NO: 191533 - DNA, 25 bp, Saccharomyces pastorianus
tcgttttaccaggatggaccaggtt

SEQ ID NO: 191534 - DNA, 25 bp, Saccharomyces pastorianus
gaacgctagaggctacagtgatgtt

SEQ ID NO: 191535 - DNA, 25 bp, Saccharomyces pastorianus
gtgtgcatacgaattgaacgctaga

SEQ ID NO: 191536 - DNA, 25 bp, Saccharomyces pastorianus
atggaccaggttatgatatgatcag

SEQ ID NO: 191537 - DNA, 25 bp, Saccharomyces pastorianus
caacttgtttaacgctactttgaag

SEQ ID NO: 191538 - DNA, 25 bp, Saccharomyces pastorianus
ccgaagatgaattggtacgttactc

SEQ ID NO: 191539 - DNA, 25 bp, Saccharomyces pastorianus
ggtacgttactcatacggccaggac

SEQ ID NO: 191540 - DNA, 25 bp, Saccharomyces pastorianus
gatgtttgtgatatcttcaccgaag

SEQ ID NO: 191541 - DNA, 25 bp, Saccharomyces pastorianus
atgctggttttgtatcgaaaaagat

SEQ ID NO: 191542 - DNA, 25 bp, Saccharomyces pastorianus
tgctggttttgtatcgaaaaagatt

SEQ ID NO: 191543 - DNA, 25 bp, Saccharomyces pastorianus
ttttgtatcgaaaaagattttcagg

SEQ ID NO: 191544 - DNA, 25 bp, Saccharomyces pastorianus
gctggttttgtatcgaaaaagattt

SEQ ID NO: 191545 - DNA, 25 bp, Saccharomyces pastorianus
ttgtatcgaaaaagattttcaggtt

SEQ ID NO: 191546 - DNA, 25 bp, Saccharomyces pastorianus
gttttgtatcgaaaaagattttcag

SEQ ID NO: 191547 - DNA, 25 bp, Saccharomyces pastorianus
tttgtatcgaaaaagattttcaggt

SEQ ID NO: 191548 - DNA, 25 bp, Saccharomyces pastorianus
tgtatcgaaaaagattttcaggttt

SEQ ID NO: 191549 - DNA, 25 bp, Saccharomyces pastorianus
gaattgtacgacattacgttcaaga

SEQ ID NO: 191550 - DNA, 25 bp, Saccharomyces pastorianus
acaagatctttttatgtactacagg

SEQ ID NO: 191551 - DNA, 25 bp, Saccharomyces pastorianus
cggaagacgccgcaaaggcacatat

SEQ ID NO: 191552 - DNA, 25 bp, Saccharomyces pastorianus
gcagctgctgatagcgtaccgcaca

SEQ ID NO: 191553 - DNA, 25 bp, Saccharomyces pastorianus
taacgacccctcaaacaagaattgt

SEQ ID NO: 191554 - DNA, 25 bp, Saccharomyces pastorianus
aaggcacatatgactaacctttttt

SEQ ID NO: 191555 - DNA, 25 bp, Saccharomyces pastorianus
ttatcccagttttttccatgcaagg

SEQ ID NO: 191556 - DNA, 25 bp, Saccharomyces pastorianus
attaaggtcatctttctgtacgaaa

SEQ ID NO: 191557 - DNA, 25 bp, Saccharomyces pastorianus
ttacccgacgcagctgctgatagcg

SEQ ID NO: 191558 - DNA, 25 bp, Saccharomyces pastorianus
tagcgtaccgcacaggcacagccag

SEQ ID NO: 191559 - DNA, 25 bp, Saccharomyces pastorianus
gattgtcactaacgacgtgtccctt

SEQ ID NO: 191560 - DNA, 25 bp, Saccharomyces pastorianus
aaccaaccatattacaagtcacaaa

SEQ ID NO: 191561 - DNA, 25 bp, Saccharomyces pastorianus
gtaaccaaccatattacaagtcaca

SEQ ID NO: 191562 - DNA, 25 bp, Saccharomyces pastorianus
tggtaaccaaccatattacaagtca

SEQ ID NO: 191563 - DNA, 25 bp, Saccharomyces pastorianus
atggtaaccaaccatattacaagtc

SEQ ID NO: 191564 - DNA, 25 bp, Saccharomyces pastorianus
tatggtaaccaaccatattacaagt

SEQ ID NO: 191565 - DNA, 25 bp, Saccharomyces pastorianus
accaaccatattacaagtcacaaat

SEQ ID NO: 191566 - DNA, 25 bp, Saccharomyces pastorianus
ggtaaccaaccatattacaagtcac

SEQ ID NO: 191567 - DNA, 25 bp, Saccharomyces pastorianus
taaccaaccatattacaagtcacaa

SEQ ID NO: 191568 - DNA, 25 bp, Saccharomyces pastorianus
gcaccagtcgataccacggcaggaa

SEQ ID NO: 191569 - DNA, 25 bp, Saccharomyces pastorianus
gatagaccatctcaagcaacaattg

SEQ ID NO: 191570 - DNA, 25 bp, Saccharomyces pastorianus
aaaaccacaagattcctcatcggaa

SEQ ID NO: 191571 - DNA, 25 bp, Saccharomyces pastorianus
tcaacccactggtgccaacgaagat

SEQ ID NO: 191572 - DNA, 25 bp, Saccharomyces pastorianus
gagcattgcgatacgatgggtcata

SEQ ID NO: 191573 - DNA, 25 bp, Saccharomyces pastorianus
gaaaatgcataacgattcgctcagt

SEQ ID NO: 191574 - DNA, 25 bp, Saccharomyces pastorianus
aatctttctcataatcaacccactg

SEQ ID NO: 191575 - DNA, 25 bp, Saccharomyces pastorianus
aacagctggaacaattacgcaacat

SEQ ID NO: 191576 - DNA, 25 bp, Saccharomyces pastorianus
aacagccgtggaatcgttgccaatt

SEQ ID NO: 191577 - DNA, 25 bp, Saccharomyces pastorianus
acgaagatgtcgaactcctgaaaaa

SEQ ID NO: 191578 - DNA, 25 bp, Saccharomyces pastorianus
gtgggctaaagaacgcgaacaattg

SEQ ID NO: 191579 - DNA, 25 bp, Saccharomyces pastorianus
gattgcattgtctatatactgtatt

SEQ ID NO: 191580 - DNA, 25 bp, Saccharomyces pastorianus
tgctcttttctgtgttccatttagt

SEQ ID NO: 191581 - DNA, 25 bp, Saccharomyces pastorianus
tttcactgctcttttctgtgttcca

SEQ ID NO: 191582 - DNA, 25 bp, Saccharomyces pastorianus
ttctgtgttccatttagtttttagt

SEQ ID NO: 191583 - DNA, 25 bp, Saccharomyces pastorianus
aatctttcactgctcttttctgtgt

SEQ ID NO: 191584 - DNA, 25 bp, Saccharomyces pastorianus
ctcttttctgtgttccatttagttt

SEQ ID NO: 191585 - DNA, 25 bp, Saccharomyces pastorianus
gtacgattgcattgtctatatactg

SEQ ID NO: 191586 - DNA, 25 bp, Saccharomyces pastorianus
actgctcttttctgtgttccattta

SEQ ID NO: 191587 - DNA, 25 bp, Saccharomyces pastorianus
agtttttagtacgattgcattgtct

SEQ ID NO: 191588 - DNA, 25 bp, Saccharomyces pastorianus
tgttccatttagtttttagtacgat

SEQ ID NO: 191589 - DNA, 25 bp, Saccharomyces pastorianus
agactcaagcaaacaatcaaagaaa

SEQ ID NO: 191590 - DNA, 25 bp, Saccharomyces pastorianus
atattactcacagtttggctccggt

SEQ ID NO: 191591 - DNA, 25 bp, Saccharomyces pastorianus
gcatgtgaggccaagctgcttcaat

SEQ ID NO: 191592 - DNA, 25 bp, Saccharomyces pastorianus
ttctctgctcgctgaagaatggcac

SEQ ID NO: 191593 - DNA, 25 bp, Saccharomyces pastorianus
tgttccttcctctcgatttttaaat

SEQ ID NO: 191594 - DNA, 25 bp, Saccharomyces pastorianus
aaatactcagtttcgacagttcaat

SEQ ID NO: 191595 - DNA, 25 bp, Saccharomyces pastorianus
tcacaggatagcgtctggaagtcaa

SEQ ID NO: 191596 - DNA, 25 bp, Saccharomyces pastorianus
aacgtctagctgagcatgtgaggcc

SEQ ID NO: 191597 - DNA, 25 bp, Saccharomyces pastorianus
gctgcttcaatattattcgaccact

SEQ ID NO: 191598 - DNA, 25 bp, Saccharomyces pastorianus
caaaatgtcttgtcttctctgctcg

SEQ ID NO: 191599 - DNA, 25 bp, Saccharomyces pastorianus
atgtttacttcgaagcctgctttca

SEQ ID NO: 191600 - DNA, 25 bp, Saccharomyces pastorianus
agatatccagattcctgttccttcc

SEQ ID NO: 191601 - DNA, 25 bp, Saccharomyces pastorianus
tggccgtctggcgacccttcgtaaa

SEQ ID NO: 191602 - DNA, 25 bp, Saccharomyces pastorianus
tgcctgtgtctctagagaatgcccc

SEQ ID NO: 191603 - DNA, 25 bp, Saccharomyces pastorianus
ataggctcggcgctgatgcaaacat

SEQ ID NO: 191604 - DNA, 25 bp, Saccharomyces pastorianus
actcagtgactggtataggctcggc

SEQ ID NO: 191605 - DNA, 25 bp, Saccharomyces pastorianus
acatggatgccgtattactagttgt

SEQ ID NO: 191606 - DNA, 25 bp, Saccharomyces pastorianus
aaatcctcgacagcatgagaacggc

SEQ ID NO: 191607 - DNA, 25 bp, Saccharomyces pastorianus
actgccctataatgacaatatcgtc

SEQ ID NO: 191608 - DNA, 25 bp, Saccharomyces pastorianus
tactagttgttaactccgcctggag

SEQ ID NO: 191609 - DNA, 25 bp, Saccharomyces pastorianus
aagcaactgcctgtgtctctagaga

SEQ ID NO: 191610 - DNA, 25 bp, Saccharomyces pastorianus
ataagtcacacactgccctataatg

SEQ ID NO: 191611 - DNA, 25 bp, Saccharomyces pastorianus
aactccgcctggaggtttctggccg

SEQ ID NO: 191612 - DNA, 25 bp, Saccharomyces pastorianus
aatacgtccacgaagtcaactcaaa

SEQ ID NO: 191613 - DNA, 25 bp, Saccharomyces pastorianus
gacggttctcattcgactattggaa

SEQ ID NO: 191614 - DNA, 25 bp, Saccharomyces pastorianus
ggttttcccttggatttgctctaca

SEQ ID NO: 191615 - DNA, 25 bp, Saccharomyces pastorianus
ttaccaacgttattgcggccattgc

SEQ ID NO: 191616 - DNA, 25 bp, Saccharomyces pastorianus
gtgtgctttcaaccactgttttttc

SEQ ID NO: 191617 - DNA, 25 bp, Saccharomyces pastorianus
gtacaactcttggtggtgtgctttc

SEQ ID NO: 191618 - DNA, 25 bp, Saccharomyces pastorianus
atcgctcatgagtgcacagcttcaa

SEQ ID NO: 191619 - DNA, 25 bp, Saccharomyces pastorianus
atttgctctacaagcatcgctcatg

SEQ ID NO: 191620 - DNA, 25 bp, Saccharomyces pastorianus
accaaagatcgtccagaagctgcta

SEQ ID NO: 191621 - DNA, 25 bp, Saccharomyces pastorianus
gagcagggcttatgacacttatgac

SEQ ID NO: 191622 - DNA, 25 bp, Saccharomyces pastorianus
gtatcacgagctcatctagagcctt

SEQ ID NO: 191623 - DNA, 25 bp, Saccharomyces pastorianus
gtctcatgaaggtgttatcgctgca

SEQ ID NO: 191624 - DNA, 25 bp, Saccharomyces pastorianus
tctgtaatcggaggttgtgctgcat

SEQ ID NO: 191625 - DNA, 25 bp, Saccharomyces pastorianus
atcgctgcatctgttatcatgggtt

SEQ ID NO: 191626 - DNA, 25 bp, Saccharomyces pastorianus
gtaggatggctgtaataaccggcat

SEQ ID NO: 191627 - DNA, 25 bp, Saccharomyces pastorianus
agatggtttggttgtcttgccagat

SEQ ID NO: 191628 - DNA, 25 bp, Saccharomyces pastorianus
gttggcttggcatgtacggtaccgt

SEQ ID NO: 191629 - DNA, 25 bp, Saccharomyces pastorianus
gtgtgcatgggccttttttacaaat

SEQ ID NO: 191630 - DNA, 25 bp, Saccharomyces pastorianus
agtgatcgtcatactgcaagccatg

SEQ ID NO: 191631 - DNA, 25 bp, Saccharomyces pastorianus
ggtctcctatgcagcaattcagtga

SEQ ID NO: 191632 - DNA, 25 bp, Saccharomyces pastorianus
tccgtttctggtgccatatggacac

SEQ ID NO: 191633 - DNA, 25 bp, Saccharomyces pastorianus
caaagctaggcgctgctatcggtgc

SEQ ID NO: 191634 - DNA, 25 bp, Saccharomyces pastorianus
tcggcgggttctacggtacctatat

SEQ ID NO: 191635 - DNA, 25 bp, Saccharomyces pastorianus
agggtgtgattcctgtaccatctac

SEQ ID NO: 191636 - DNA, 25 bp, Saccharomyces pastorianus
gctcccgttacgtggtcatcgaaga

SEQ ID NO: 191637 - DNA, 25 bp, Saccharomyces pastorianus
ctcatggagctattcacgatctacc

SEQ ID NO: 191638 - DNA, 25 bp, Saccharomyces pastorianus
gtgcaaatactggtcgtccggacat

SEQ ID NO: 191639 - DNA, 25 bp, Saccharomyces pastorianus
tacgtgactctacttgctggtgctc

SEQ ID NO: 191640 - DNA, 25 bp, Saccharomyces pastorianus
aattcctcggtcttaacattcatca

SEQ ID NO: 191641 - DNA, 25 bp, Saccharomyces pastorianus
agaacctcgcgcaatccatttggag

SEQ ID NO: 191642 - DNA, 25 bp, Saccharomyces pastorianus
ggtcagcttctcttttgtgcaaata

SEQ ID NO: 191643 - DNA, 25 bp, Saccharomyces pastorianus
atttaaacttacacagactccgctc

SEQ ID NO: 191644 - DNA, 25 bp, Saccharomyces pastorianus
gtatcgttctggatctcagttggca

SEQ ID NO: 191645 - DNA, 25 bp, Saccharomyces pastorianus
gcaactgttctctgcttaaacgaag

SEQ ID NO: 191646 - DNA, 25 bp, Saccharomyces pastorianus
ccatcatgggctccggaactgtaaa

SEQ ID NO: 191647 - DNA, 25 bp, Saccharomyces pastorianus
agatcttcatctgctagtgtcgcga

SEQ ID NO: 191648 - DNA, 25 bp, Saccharomyces pastorianus
gaagtcctggctctgtatgttatct

SEQ ID NO: 191649 - DNA, 25 bp, Saccharomyces pastorianus
tagtgtcgcgattcctgactatgaa

SEQ ID NO: 191650 - DNA, 25 bp, Saccharomyces pastorianus
aatttacggagctgatcatcgcata

SEQ ID NO: 191651 - DNA, 25 bp, Saccharomyces pastorianus
gacacaggatgtacttcccacatgt

SEQ ID NO: 191652 - DNA, 25 bp, Saccharomyces pastorianus
acgaccgttccattttttcatcatt

SEQ ID NO: 191653 - DNA, 25 bp, Saccharomyces pastorianus
atgttatcttcgactgttccagcta

SEQ ID NO: 191654 - DNA, 25 bp, Saccharomyces pastorianus
ttccagctaccaaatcctcagaatg

SEQ ID NO: 191655 - DNA, 25 bp, Saccharomyces pastorianus
gaggagttggcggttccatacccat

SEQ ID NO: 191656 - DNA, 25 bp, Saccharomyces pastorianus
ggatccaggcttactcttatagagg

SEQ ID NO: 191657 - DNA, 25 bp, Saccharomyces pastorianus
aattcgttcataccggagatatcca

SEQ ID NO: 191658 - DNA, 25 bp, Saccharomyces pastorianus
aaattcggtgactctaaggctcttc

SEQ ID NO: 191659 - DNA, 25 bp, Saccharomyces pastorianus
agggattacaatctcagcgcgaatg

SEQ ID NO: 191660 - DNA, 25 bp, Saccharomyces pastorianus
gaattcatcatcttcggtctcagat

SEQ ID NO: 191661 - DNA, 25 bp, Saccharomyces pastorianus
aaggctcttcagctatcacaagtca

SEQ ID NO: 191662 - DNA, 25 bp, Saccharomyces pastorianus
attcgcttggaagggtctctgctta

SEQ ID NO: 191663 - DNA, 25 bp, Saccharomyces pastorianus
gttattaatgaccttcttacccgag

SEQ ID NO: 191664 - DNA, 25 bp, Saccharomyces pastorianus
taccaaatatatcctccaagcctgt

SEQ ID NO: 191665 - DNA, 25 bp, Saccharomyces pastorianus
tatcgagaccgctgctgaatatgct

SEQ ID NO: 191666 - DNA, 25 bp, Saccharomyces pastorianus
gcttatgatattttctcgcacttcg

SEQ ID NO: 191667 - DNA, 25 bp, Saccharomyces pastorianus
gctgctccttcaggtaactataagc

SEQ ID NO: 191668 - DNA, 25 bp, Saccharomyces pastorianus
gctccttcaggtaactataagcaat

SEQ ID NO: 191669 - DNA, 25 bp, Saccharomyces pastorianus
actaagtcagtaccgttaatgataa

SEQ ID NO: 191670 - DNA, 25 bp, Saccharomyces pastorianus
aacattagtgggaggaggcgctaaa

SEQ ID NO: 191671 - DNA, 25 bp, Saccharomyces pastorianus
caaactaagtcagtaccgttaatga

SEQ ID NO: 191672 - DNA, 25 bp, Saccharomyces pastorianus
gtatacacagtacgatctccatcct

SEQ ID NO: 191673 - DNA, 25 bp, Saccharomyces pastorianus
tcgctgctccttcaggtaactataa

SEQ ID NO: 191674 - DNA, 25 bp, Saccharomyces pastorianus
attaacattagtgggaggaggcgct

SEQ ID NO: 191675 - DNA, 25 bp, Saccharomyces pastorianus
caggtaactataagcaattaacatt

SEQ ID NO: 191676 - DNA, 25 bp, Saccharomyces pastorianus
atacacagtacgatctccatcctcg

SEQ ID NO: 191677 - DNA, 25 bp, Saccharomyces pastorianus
agtatacacagtacgatctccatcc

SEQ ID NO: 191678 - DNA, 25 bp, Saccharomyces pastorianus
aacagttgtgtgaaatttttccaga

SEQ ID NO: 191679 - DNA, 25 bp, Saccharomyces pastorianus
ctgatcctctttccattattaaatg

SEQ ID NO: 191680 - DNA, 25 bp, Saccharomyces pastorianus
acctttcaaggccatgcctaagaaa

SEQ ID NO: 191681 - DNA, 25 bp, Saccharomyces pastorianus
gtatataacccctcacctttcaagg

SEQ ID NO: 191682 - DNA, 25 bp, Saccharomyces pastorianus
ttcctgatcctctttccattattaa

SEQ ID NO: 191683 - DNA, 25 bp, Saccharomyces pastorianus
gagtatgttgtttttcaacacgaaa

SEQ ID NO: 191684 - DNA, 25 bp, Saccharomyces pastorianus
caacacgaaattcctgatcctcttt

SEQ ID NO: 191685 - DNA, 25 bp, Saccharomyces pastorianus
atggatacatgcgaacaggccgaat

SEQ ID NO: 191686 - DNA, 25 bp, Saccharomyces pastorianus
tatgacccgaaacagttgtgtgaaa

SEQ ID NO: 191687 - DNA, 25 bp, Saccharomyces pastorianus
ttcagatcgtatataacccctcacc

SEQ ID NO: 191688 - DNA, 25 bp, Saccharomyces pastorianus
gaacaggccgaattttcagatcgta

SEQ ID NO: 191689 - DNA, 25 bp, Saccharomyces pastorianus
gccctggatagcgaagcgtgcggtt

SEQ ID NO: 191690 - DNA, 25 bp, Saccharomyces pastorianus
aaggacgtctgtgatgttggagata

SEQ ID NO: 191691 - DNA, 25 bp, Saccharomyces pastorianus
aactcttcttgagacgatttggccc

SEQ ID NO: 191692 - DNA, 25 bp, Saccharomyces pastorianus
atgtattttgttaactcttcttgag

SEQ ID NO: 191693 - DNA, 25 bp, Saccharomyces pastorianus
ttgagacgatttggccctggatagc

SEQ ID NO: 191694 - DNA, 25 bp, Saccharomyces pastorianus
ctgtgatgttggagatatgtatttt

SEQ ID NO: 191695 - DNA, 25 bp, Saccharomyces pastorianus
acgatttggccctggatagcgaagc

SEQ ID NO: 191696 - DNA, 25 bp, Saccharomyces pastorianus
tcttgagacgatttggccctggata

SEQ ID NO: 191697 - DNA, 25 bp, Saccharomyces pastorianus
cttcttgagacgatttggccctgga

SEQ ID NO: 191698 - DNA, 25 bp, Saccharomyces pastorianus
tttggccctggatagcgaagcgtgc

SEQ ID NO: 191699 - DNA, 25 bp, Saccharomyces pastorianus
aattgttgtagaaggacgtctgtga

SEQ ID NO: 191700 - DNA, 25 bp, Saccharomyces pastorianus
gtatggataagtttcgacgctggag

SEQ ID NO: 191701 - DNA, 25 bp, Saccharomyces pastorianus
ggaggctcctatagaaacatcattt

SEQ ID NO: 191702 - DNA, 25 bp, Saccharomyces pastorianus
catgccatatatactctttgggtaa

SEQ ID NO: 191703 - DNA, 25 bp, Saccharomyces pastorianus
ttcgcttttatatgtgaatcaccca

SEQ ID NO: 191704 - DNA, 25 bp, Saccharomyces pastorianus
gatttactgttgatcctttccatgg

SEQ ID NO: 191705 - DNA, 25 bp, Saccharomyces pastorianus
aaattctacattaccgacgaccgtg

SEQ ID NO: 191706 - DNA, 25 bp, Saccharomyces pastorianus
tgtcccaaaagtaacggaggctcct

SEQ ID NO: 191707 - DNA, 25 bp, Saccharomyces pastorianus
gatggcgactgttttataactactc

SEQ ID NO: 191708 - DNA, 25 bp, Saccharomyces pastorianus
gggagtcatggagggctttaactat

SEQ ID NO: 191709 - DNA, 25 bp, Saccharomyces pastorianus
atgattccaacacttctatcagatt

SEQ ID NO: 191710 - DNA, 25 bp, Saccharomyces pastorianus
gacgcagacgttttatatgacccaa

SEQ ID NO: 191711 - DNA, 25 bp, Saccharomyces pastorianus
ttccagctgaacaagtcaccagagt

SEQ ID NO: 191712 - DNA, 25 bp, Saccharomyces pastorianus
tattccagctgaacaagtcaccaga

SEQ ID NO: 191713 - DNA, 25 bp, Saccharomyces pastorianus
gttgactggtattccagctgaacaa

SEQ ID NO: 191714 - DNA, 25 bp, Saccharomyces pastorianus
ctggtattccagctgaacaagtcac

SEQ ID NO: 191715 - DNA, 25 bp, Saccharomyces pastorianus
gtattccagctgaacaagtcaccag

SEQ ID NO: 191716 - DNA, 25 bp, Saccharomyces pastorianus
ttgactggtattccagctgaacaag

SEQ ID NO: 191717 - DNA, 25 bp, Saccharomyces pastorianus
tgactggtattccagctgaacaagt

SEQ ID NO: 191718 - DNA, 25 bp, Saccharomyces pastorianus
tggtattccagctgaacaagtcacc

SEQ ID NO: 191719 - DNA, 25 bp, Saccharomyces pastorianus
actggtattccagctgaacaagtca

SEQ ID NO: 191720 - DNA, 25 bp, Saccharomyces pastorianus
ggtattccagctgaacaagtcacca

SEQ ID NO: 191721 - DNA, 25 bp, Saccharomyces pastorianus
attccagctgaacaagtcaccagag

SEQ ID NO: 191722 - DNA, 25 bp, Saccharomyces pastorianus
ggcgtcagccatgcctttacaagga

SEQ ID NO: 191723 - DNA, 25 bp, Saccharomyces pastorianus
agccgaggtttatgcgttttcgcga

SEQ ID NO: 191724 - DNA, 25 bp, Saccharomyces pastorianus
cgtttgctcatcatctttgtcgaaa

SEQ ID NO: 191725 - DNA, 25 bp, Saccharomyces pastorianus
ctagccgctccattattgtgtggtg

SEQ ID NO: 191726 - DNA, 25 bp, Saccharomyces pastorianus
tcaattgctgctcctgaagttaatg

SEQ ID NO: 191727 - DNA, 25 bp, Saccharomyces pastorianus
ggaggctccatcgtttcaattgctg

SEQ ID NO: 191728 - DNA, 25 bp, Saccharomyces pastorianus
caagcagtgctatcggatctaggaa

SEQ ID NO: 191729 - DNA, 25 bp, Saccharomyces pastorianus
ggtgctgatcactatattgctatgt

SEQ ID NO: 191730 - DNA, 25 bp, Saccharomyces pastorianus
aatactctaacgctttggaccttct

SEQ ID NO: 191731 - DNA, 25 bp, Saccharomyces pastorianus
ggtattacagttttctctccactac

SEQ ID NO: 191732 - DNA, 25 bp, Saccharomyces pastorianus
ggattctatgaaactcggtgctgat

SEQ ID NO: 191733 - DNA, 25 bp, Saccharomyces pastorianus
gctatgtcccaaaacacggctgaag

SEQ ID NO: 191734 - DNA, 25 bp, Saccharomyces pastorianus
actgttcccatgtttagatacgttg

SEQ ID NO: 191735 - DNA, 25 bp, Saccharomyces pastorianus
atgttggcggcttagtatctgtgac

SEQ ID NO: 191736 - DNA, 25 bp, Saccharomyces pastorianus
cagccagagtttgcagagtttcaat

SEQ ID NO: 191737 - DNA, 25 bp, Saccharomyces pastorianus
caattttgatgccttctgggattta

SEQ ID NO: 191738 - DNA, 25 bp, Saccharomyces pastorianus
taaaagccaataccgctatgtccca

SEQ ID NO: 191739 - DNA, 25 bp, Saccharomyces pastorianus
tggaggatgcagttctctccagttc

SEQ ID NO: 191740 - DNA, 25 bp, Saccharomyces pastorianus
gtttcaatcaagttctgttgtgcca

SEQ ID NO: 191741 - DNA, 25 bp, Saccharomyces pastorianus
aagatagttactttggtgcttacca

SEQ ID NO: 191742 - DNA, 25 bp, Saccharomyces pastorianus
aaaattggcctcttccagtatatcc

SEQ ID NO: 191743 - DNA, 25 bp, Saccharomyces pastorianus
ctctccagttccttcgcaataaaag

SEQ ID NO: 191744 - DNA, 25 bp, Saccharomyces pastorianus
cagtatcgatctaacgccagacaat

SEQ ID NO: 191745 - DNA, 25 bp, Saccharomyces pastorianus
ttagaaagtatagttccttttgaca

SEQ ID NO: 191746 - DNA, 25 bp, Saccharomyces pastorianus
aaatggaacgtgttgaacagagatt

SEQ ID NO: 191747 - DNA, 25 bp, Saccharomyces pastorianus
atagttccttttgacatcggatttc

SEQ ID NO: 191748 - DNA, 25 bp, Saccharomyces pastorianus
tattctggtccagcagggcaaggtc

SEQ ID NO: 191749 - DNA, 25 bp, Saccharomyces pastorianus
gaacattaaggctctcagtatcgat

SEQ ID NO: 191750 - DNA, 25 bp, Saccharomyces pastorianus
aaactactacgctacatcttatggt

SEQ ID NO: 191751 - DNA, 25 bp, Saccharomyces pastorianus
tatggtaaaactccctttagtatct

SEQ ID NO: 191752 - DNA, 25 bp, Saccharomyces pastorianus
gcatattctggtccagcagggcaag

SEQ ID NO: 191753 - DNA, 25 bp, Saccharomyces pastorianus
cgtgttgaacagagattttgagcgt

SEQ ID NO: 191754 - DNA, 25 bp, Saccharomyces pastorianus
tgttgaacagagattttgagcgtga

SEQ ID NO: 191755 - DNA, 25 bp, Saccharomyces pastorianus
gccatactcaccttcacttatattg

SEQ ID NO: 191756 - DNA, 25 bp, Saccharomyces pastorianus
catactcaccttcacttatattgat

SEQ ID NO: 191757 - DNA, 25 bp, Saccharomyces pastorianus
actcaccttcacttatattgatggg

SEQ ID NO: 191758 - DNA, 25 bp, Saccharomyces pastorianus
atattgatggggcatacgcacacgg

SEQ ID NO: 191759 - DNA, 25 bp, Saccharomyces pastorianus
atactcaccttcacttatattgatg

SEQ ID NO: 191760 - DNA, 25 bp, Saccharomyces pastorianus
caccttcacttatattgatggggca

SEQ ID NO: 191761 - DNA, 25 bp, Saccharomyces pastorianus
tactcaccttcacttatattgatgg

SEQ ID NO: 191762 - DNA, 25 bp, Saccharomyces pastorianus
tcaccttcacttatattgatggggc

SEQ ID NO: 191763 - DNA, 25 bp, Saccharomyces pastorianus
acttatattgatggggcatacgcac

SEQ ID NO: 191764 - DNA, 25 bp, Saccharomyces pastorianus
ccatactcaccttcacttatattga

SEQ ID NO: 191765 - DNA, 25 bp, Saccharomyces pastorianus
tgccatactcaccttcacttatatt

SEQ ID NO: 191766 - DNA, 25 bp, Saccharomyces pastorianus
gaagaacctgagttaaacgtgtcgc

SEQ ID NO: 191767 - DNA, 25 bp, Saccharomyces pastorianus
cttcttatcctacgaatctctaaaa

SEQ ID NO: 191768 - DNA, 25 bp, Saccharomyces pastorianus
ttaatcttaccgacgatgtaattag

SEQ ID NO: 191769 - DNA, 25 bp, Saccharomyces pastorianus
taaacgtgtcgcttaatcttaccga

SEQ ID NO: 191770 - DNA, 25 bp, Saccharomyces pastorianus
tcgcttaatcttaccgacgatgtaa

SEQ ID NO: 191771 - DNA, 25 bp, Saccharomyces pastorianus
gaccgataacatgtcagacttcgta

SEQ ID NO: 191772 - DNA, 25 bp, Saccharomyces pastorianus
gaacctgagttaaacgtgtcgctta

SEQ ID NO: 191773 - DNA, 25 bp, Saccharomyces pastorianus
gagttaaacgtgtcgcttaatctta

SEQ ID NO: 191774 - DNA, 25 bp, Saccharomyces pastorianus
taacatgtcagacttcgtaccaatt

SEQ ID NO: 191775 - DNA, 25 bp, Saccharomyces pastorianus
acgtgtcgcttaatcttaccgacga

SEQ ID NO: 191776 - DNA, 25 bp, Saccharomyces pastorianus
gtgtcgcttaatcttaccgacgatg

SEQ ID NO: 191777 - DNA, 25 bp, Saccharomyces pastorianus
ccgatatttatcgttcaagaacatc

SEQ ID NO: 191778 - DNA, 25 bp, Saccharomyces pastorianus
acatacttcatcaagcgtagccgat

SEQ ID NO: 191779 - DNA, 25 bp, Saccharomyces pastorianus
agcgtagccgatatttatcgttcaa

SEQ ID NO: 191780 - DNA, 25 bp, Saccharomyces pastorianus
catctactgatgtcaccacattagc

SEQ ID NO: 191781 - DNA, 25 bp, Saccharomyces pastorianus
atacttcatcaagcgtagccgatat

SEQ ID NO: 191782 - DNA, 25 bp, Saccharomyces pastorianus
tcaagcgtagccgatatttatcgtt

SEQ ID NO: 191783 - DNA, 25 bp, Saccharomyces pastorianus
tactgatgtcaccacattagcagct

SEQ ID NO: 191784 - DNA, 25 bp, Saccharomyces pastorianus
tcatcaagcgtagccgatatttatc

SEQ ID NO: 191785 - DNA, 25 bp, Saccharomyces pastorianus
gtagccgatatttatcgttcaagaa

SEQ ID NO: 191786 - DNA, 25 bp, Saccharomyces pastorianus
tctactgatgtcaccacattagcag

SEQ ID NO: 191787 - DNA, 25 bp, Saccharomyces pastorianus
acttcatcaagcgtagccgatattt

SEQ ID NO: 191788 - DNA, 25 bp, Saccharomyces pastorianus
ttcatccagcggtatactaacaaat

SEQ ID NO: 191789 - DNA, 25 bp, Saccharomyces pastorianus
gatcatccatttggattttatgcca

SEQ ID NO: 191790 - DNA, 25 bp, Saccharomyces pastorianus
gtagtagttttcctccttttatgct

SEQ ID NO: 191791 - DNA, 25 bp, Saccharomyces pastorianus
aggcatacacaatttcatccagcgg

SEQ ID NO: 191792 - DNA, 25 bp, Saccharomyces pastorianus
tttgtgtctacagcgtcttcaggaa

SEQ ID NO: 191793 - DNA, 25 bp, Saccharomyces pastorianus
gcttacattctgtaggcatacacaa

SEQ ID NO: 191794 - DNA, 25 bp, Saccharomyces pastorianus
gggaagctggtatcccaggcaaaga

SEQ ID NO: 191795 - DNA, 25 bp, Saccharomyces pastorianus
gatgggtccatggatttacagaaat

SEQ ID NO: 191796 - DNA, 25 bp, Saccharomyces pastorianus
ttttcctccttttatgcttacattc

SEQ ID NO: 191797 - DNA, 25 bp, Saccharomyces pastorianus
gatgaacttaacttgttttacttga

SEQ ID NO: 191798 - DNA, 25 bp, Saccharomyces pastorianus
agttaagaaagctgatgggtccatg

SEQ ID NO: 191799 - DNA, 25 bp, Saccharomyces pastorianus
gagaaacttagctaccttatgcggt

SEQ ID NO: 191800 - DNA, 25 bp, Saccharomyces pastorianus
gtacatgaagcctttacccgtcccg

SEQ ID NO: 191801 - DNA, 25 bp, Saccharomyces pastorianus
ccaatcgattagagcatgacggtat

SEQ ID NO: 191802 - DNA, 25 bp, Saccharomyces pastorianus
gataccggtgcctgattttaatatt

SEQ ID NO: 191803 - DNA, 25 bp, Saccharomyces pastorianus
gaatattttgagttttccaatcgat

SEQ ID NO: 191804 - DNA, 25 bp, Saccharomyces pastorianus
gtgagacgagaaacttagctacctt

SEQ ID NO: 191805 - DNA, 25 bp, Saccharomyces pastorianus
ccttatgcggtaatggtctagattt

SEQ ID NO: 191806 - DNA, 25 bp, Saccharomyces pastorianus
agattttgagataccggtgcctgat

SEQ ID NO: 191807 - DNA, 25 bp, Saccharomyces pastorianus
gaggtgacaatttggaagcagatcc

SEQ ID NO: 191808 - DNA, 25 bp, Saccharomyces pastorianus
tggttgcgagtgttgctaagaacga

SEQ ID NO: 191809 - DNA, 25 bp, Saccharomyces pastorianus
ccgtcccgaaagatttggttgcgag

SEQ ID NO: 191810 - DNA, 25 bp, Saccharomyces pastorianus
atcacagggttttgttatgagaaaa

SEQ ID NO: 191811 - DNA, 25 bp, Saccharomyces pastorianus
taatgaactcaaattatcacagggt

SEQ ID NO: 191812 - DNA, 25 bp, Saccharomyces pastorianus
aattatcacagggttttgttatgag

SEQ ID NO: 191813 - DNA, 25 bp, Saccharomyces pastorianus
tttccttagatgaagtaactgttcg

SEQ ID NO: 191814 - DNA, 25 bp, Saccharomyces pastorianus
gtaactgttcgtaatgaactcaaat

SEQ ID NO: 191815 - DNA, 25 bp, Saccharomyces pastorianus
gatgaagtaactgttcgtaatgaac

SEQ ID NO: 191816 - DNA, 25 bp, Saccharomyces pastorianus
aactagaagcttttccttagatgaa

SEQ ID NO: 191817 - DNA, 25 bp, Saccharomyces pastorianus
atggcagtaaatatcagcaaacagc

SEQ ID NO: 191818 - DNA, 25 bp, Saccharomyces pastorianus
atatcagcaaacagccaactagaag

SEQ ID NO: 191819 - DNA, 25 bp, Saccharomyces pastorianus
gaagcttttccttagatgaagtaac

SEQ ID NO: 191820 - DNA, 25 bp, Saccharomyces pastorianus
agccaactagaagcttttccttaga

SEQ ID NO: 191821 - DNA, 25 bp, Saccharomyces pastorianus
caagagacaaatgggctacgcggta

SEQ ID NO: 191822 - DNA, 25 bp, Saccharomyces pastorianus
ggttttgccgtccattatgctccat

SEQ ID NO: 191823 - DNA, 25 bp, Saccharomyces pastorianus
atgctccatctttcttaatgcaacg

SEQ ID NO: 191824 - DNA, 25 bp, Saccharomyces pastorianus
acttccacgttcaggttattcacta

SEQ ID NO: 191825 - DNA, 25 bp, Saccharomyces pastorianus
tttgcatcactacttacctgcttat

SEQ ID NO: 191826 - DNA, 25 bp, Saccharomyces pastorianus
tacgcggtagtgatcactttccttg

SEQ ID NO: 191827 - DNA, 25 bp, Saccharomyces pastorianus
tagtttcttatgttttccgcagcaa

SEQ ID NO: 191828 - DNA, 25 bp, Saccharomyces pastorianus
tggccacgccttggacataatagtt

SEQ ID NO: 191829 - DNA, 25 bp, Saccharomyces pastorianus
tgaaggactccaaggttgttaactt

SEQ ID NO: 191830 - DNA, 25 bp, Saccharomyces pastorianus
attatttcggtattcttgcccttgg

SEQ ID NO: 191831 - DNA, 25 bp, Saccharomyces pastorianus
attcactacttattgggttttgccg

SEQ ID NO: 191832 - DNA, 25 bp, Saccharomyces pastorianus
aggccactaacagcttctctttaag

SEQ ID NO: 191833 - DNA, 25 bp, Saccharomyces pastorianus
aggccatgccaagccatgcaatcta

SEQ ID NO: 191834 - DNA, 25 bp, Saccharomyces pastorianus
gggccctgcttgatatccagttcgg

SEQ ID NO: 191835 - DNA, 25 bp, Saccharomyces pastorianus
gaggcaaacccaccgaaatgtactt

SEQ ID NO: 191836 - DNA, 25 bp, Saccharomyces pastorianus
tcaaacaccacgctgtcaggccatg

SEQ ID NO: 191837 - DNA, 25 bp, Saccharomyces pastorianus
ctctttaagagtgaccatggttcgt

SEQ ID NO: 191838 - DNA, 25 bp, Saccharomyces pastorianus
attcggcactcggatcggtaacaat

SEQ ID NO: 191839 - DNA, 25 bp, Saccharomyces pastorianus
ccgtgcttgtagctgttagctgttt

SEQ ID NO: 191840 - DNA, 25 bp, Saccharomyces pastorianus
gatcatcctgctctacacgtttgta

SEQ ID NO: 191841 - DNA, 25 bp, Saccharomyces pastorianus
gtttgtacgttttctcttccgacat

SEQ ID NO: 191842 - DNA, 25 bp, Saccharomyces pastorianus
ggttcgtaacgaggccaattcggca

SEQ ID NO: 191843 - DNA, 25 bp, Saccharomyces pastorianus
tttgttcccattttcttatcaatag

SEQ ID NO: 191844 - DNA, 25 bp, Saccharomyces pastorianus
tgattttttgttcccattttcttat

SEQ ID NO: 191845 - DNA, 25 bp, Saccharomyces pastorianus
aatatcagagagatctcaccagcta

SEQ ID NO: 191846 - DNA, 25 bp, Saccharomyces pastorianus
taatattggtcttcagaaacctgga

SEQ ID NO: 191847 - DNA, 25 bp, Saccharomyces pastorianus
ctggctcataaaaacaggaactttt

SEQ ID NO: 191848 - DNA, 25 bp, Saccharomyces pastorianus
aacctggaaccacatgtgaactatt

SEQ ID NO: 191849 - DNA, 25 bp, Saccharomyces pastorianus
gaaatttataagtttatggcacttg

SEQ ID NO: 191850 - DNA, 25 bp, Saccharomyces pastorianus
tcagagagatctcaccagctacaac

SEQ ID NO: 191851 - DNA, 25 bp, Saccharomyces pastorianus
gaatctaaaaatttgaaactggctc

SEQ ID NO: 191852 - DNA, 25 bp, Saccharomyces pastorianus
ggtcttcagaaacctggaaccacat

SEQ ID NO: 191853 - DNA, 25 bp, Saccharomyces pastorianus
atggcacttgttaaaattgtttgga

SEQ ID NO: 191854 - DNA, 25 bp, Saccharomyces pastorianus
gttccctccatgatgcactatgtgt

SEQ ID NO: 191855 - DNA, 25 bp, Saccharomyces pastorianus
gtctctgttgttattcgtggtgcaa

SEQ ID NO: 191856 - DNA, 25 bp, Saccharomyces pastorianus
tgatgaaacagagcgttccctccat

SEQ ID NO: 191857 - DNA, 25 bp, Saccharomyces pastorianus
gcaagaccaaccgtctctgttgtta

SEQ ID NO: 191858 - DNA, 25 bp, Saccharomyces pastorianus
tgcactatgtgttattcgttgtcta

SEQ ID NO: 191859 - DNA, 25 bp, Saccharomyces pastorianus
gattgggttccgctgatttagttga

SEQ ID NO: 191860 - DNA, 25 bp, Saccharomyces pastorianus
ttcgtggtgcaaacaacatgatcat

SEQ ID NO: 191861 - DNA, 25 bp, Saccharomyces pastorianus
tgtacaggcttttatttggcaagaa

SEQ ID NO: 191862 - DNA, 25 bp, Saccharomyces pastorianus
tgggttgtaagccaattgctgatat

SEQ ID NO: 191863 - DNA, 25 bp, Saccharomyces pastorianus
aagttgtcacagaattgcgctctaa

SEQ ID NO: 191864 - DNA, 25 bp, Saccharomyces pastorianus
aaatcgagtttctgtcgaagggctt

SEQ ID NO: 191865 - DNA, 25 bp, Saccharomyces pastorianus
gagcctttgcgtaccatattattct

SEQ ID NO: 191866 - DNA, 25 bp, Saccharomyces pastorianus
aagcatcagtgagatgagctatgat

SEQ ID NO: 191867 - DNA, 25 bp, Saccharomyces pastorianus
catcttcgtcttctaacagagaatg

SEQ ID NO: 191868 - DNA, 25 bp, Saccharomyces pastorianus
ccactctaatatgttttctcttcct

SEQ ID NO: 191869 - DNA, 25 bp, Saccharomyces pastorianus
tgcagaagcgcagtttgaaaatttt

SEQ ID NO: 191870 - DNA, 25 bp, Saccharomyces pastorianus
cagagaatggtcatcatctttatta

SEQ ID NO: 191871 - DNA, 25 bp, Saccharomyces pastorianus
accatattattctatacacccactc

SEQ ID NO: 191872 - DNA, 25 bp, Saccharomyces pastorianus
gagctatgatgagatgagcttcatt

SEQ ID NO: 191873 - DNA, 25 bp, Saccharomyces pastorianus
gtcttagttctgtttgagcctttgc

SEQ ID NO: 191874 - DNA, 25 bp, Saccharomyces pastorianus
atggctaagacttcttcctcatctt

SEQ ID NO: 191875 - DNA, 25 bp, Saccharomyces pastorianus
atatgttttctcttcctccaaaact

SEQ ID NO: 191876 - DNA, 25 bp, Saccharomyces pastorianus
gtagatcgcctagcgtttgaccaaa

SEQ ID NO: 191877 - DNA, 25 bp, Saccharomyces pastorianus
gatcgcctagcgtttgaccaaattt

SEQ ID NO: 191878 - DNA, 25 bp, Saccharomyces pastorianus
tttttctctgttacgagggatatat

SEQ ID NO: 191879 - DNA, 25 bp, Saccharomyces pastorianus
gattgttggccgtagatcgcctagc

SEQ ID NO: 191880 - DNA, 25 bp, Saccharomyces pastorianus
gcttgttagttcattataagtgcta

SEQ ID NO: 191881 - DNA, 25 bp, Saccharomyces pastorianus
gcgtttgaccaaatttaattctcct

SEQ ID NO: 191882 - DNA, 25 bp, Saccharomyces pastorianus
agaggttttgctgaattttaatagg

SEQ ID NO: 191883 - DNA, 25 bp, Saccharomyces pastorianus
tgatgcctgtgcttgttagttcatt

SEQ ID NO: 191884 - DNA, 25 bp, Saccharomyces pastorianus
gaagtttacgttatgattgttggcc

SEQ ID NO: 191885 - DNA, 25 bp, Saccharomyces pastorianus
gggatatatgatgcctgtgcttgtt

SEQ ID NO: 191886 - DNA, 25 bp, Saccharomyces pastorianus
gcctgtgcttgttagttcattataa

SEQ ID NO: 191887 - DNA, 25 bp, Saccharomyces pastorianus
tggtgcatttttggtgtttagggaa

SEQ ID NO: 191888 - DNA, 25 bp, Saccharomyces pastorianus
gaaaacggtcgcatttttgatctaa

SEQ ID NO: 191889 - DNA, 25 bp, Saccharomyces pastorianus
cttgtttttgcctcgttaggtaatg

SEQ ID NO: 191890 - DNA, 25 bp, Saccharomyces pastorianus
acgatgaaggaactgctttactata

SEQ ID NO: 191891 - DNA, 25 bp, Saccharomyces pastorianus
gtgactggtgcatttttggtgttta

SEQ ID NO: 191892 - DNA, 25 bp, Saccharomyces pastorianus
gcctcgttaggtaatgataagcttt

SEQ ID NO: 191893 - DNA, 25 bp, Saccharomyces pastorianus
tcattgaaactgaagtgactggtgc

SEQ ID NO: 191894 - DNA, 25 bp, Saccharomyces pastorianus
aaacggtcgcatttttgatctaaat

SEQ ID NO: 191895 - DNA, 25 bp, Saccharomyces pastorianus
atttttgatctaaatggaccaacga

SEQ ID NO: 191896 - DNA, 25 bp, Saccharomyces pastorianus
acaggatacaatgtacgatttacag

SEQ ID NO: 191897 - DNA, 25 bp, Saccharomyces pastorianus
tggaccaacgatgaaggaactgctt

SEQ ID NO: 191898 - DNA, 25 bp, Saccharomyces pastorianus
aaacgcggaaaatggacaaatgaca

SEQ ID NO: 191899 - DNA, 25 bp, Saccharomyces pastorianus
ggatggaaattcgtgtgcaggttac

SEQ ID NO: 191900 - DNA, 25 bp, Saccharomyces pastorianus
gatagatttatcaccagccttccct

SEQ ID NO: 191901 - DNA, 25 bp, Saccharomyces pastorianus
cagccttccctgaagatcttatctt

SEQ ID NO: 191902 - DNA, 25 bp, Saccharomyces pastorianus
ggaaattcgtgtgcaggttacaaat

SEQ ID NO: 191903 - DNA, 25 bp, Saccharomyces pastorianus
tggtccaaattgtacccttactaca

SEQ ID NO: 191904 - DNA, 25 bp, Saccharomyces pastorianus
tttatcaccagccttccctgaagat

SEQ ID NO: 191905 - DNA, 25 bp, Saccharomyces pastorianus
gaagatcttatcttagggatggaaa

SEQ ID NO: 191906 - DNA, 25 bp, Saccharomyces pastorianus
aaagaaggtgacgattgctgatatt

SEQ ID NO: 191907 - DNA, 25 bp, Saccharomyces pastorianus
gattcggtgggttgatgatagattt

SEQ ID NO: 191908 - DNA, 25 bp, Saccharomyces pastorianus
attgctgatattggctgtggattcg

SEQ ID NO: 191909 - DNA, 25 bp, Saccharomyces pastorianus
ttttccaccgataaagcccaagact

SEQ ID NO: 191910 - DNA, 25 bp, Saccharomyces pastorianus
gagggcgcttgtgtcgaacccttat

SEQ ID NO: 191911 - DNA, 25 bp, Saccharomyces pastorianus
gtcaagccattgataacccacaaat

SEQ ID NO: 191912 - DNA, 25 bp, Saccharomyces pastorianus
cattcggtgattatcgtgacgctgt

SEQ ID NO: 191913 - DNA, 25 bp, Saccharomyces pastorianus
gtgacgctgtgaacttggttgccac

SEQ ID NO: 191914 - DNA, 25 bp, Saccharomyces pastorianus
gatgtttgcattgatgccgctgtca

SEQ ID NO: 191915 - DNA, 25 bp, Saccharomyces pastorianus
gactacaacattgcccatggtggag

SEQ ID NO: 191916 - DNA, 25 bp, Saccharomyces pastorianus
aagttgttgtatttggtgcaggtcc

SEQ ID NO: 191917 - DNA, 25 bp, Saccharomyces pastorianus
aaagatttcggagccacaaacactt

SEQ ID NO: 191918 - DNA, 25 bp, Saccharomyces pastorianus
gatgtttccgttattcattcggtga

SEQ ID NO: 191919 - DNA, 25 bp, Saccharomyces pastorianus
gaacccttatcagtcggtgtacact

SEQ ID NO: 191920 - DNA, 25 bp, Saccharomyces pastorianus
gccaaatactgatacctcatcaaaa

SEQ ID NO: 191921 - DNA, 25 bp, Saccharomyces pastorianus
agtcgccaaatactgatacctcatc

SEQ ID NO: 191922 - DNA, 25 bp, Saccharomyces pastorianus
atagtcgccaaatactgatacctca

SEQ ID NO: 191923 - DNA, 25 bp, Saccharomyces pastorianus
tagtcgccaaatactgatacctcat

SEQ ID NO: 191924 - DNA, 25 bp, Saccharomyces pastorianus
taatagtcgccaaatactgatacct

SEQ ID NO: 191925 - DNA, 25 bp, Saccharomyces pastorianus
cattcaaataatagtcgccaaatac

SEQ ID NO: 191926 - DNA, 25 bp, Saccharomyces pastorianus
aatagtcgccaaatactgatacctc

SEQ ID NO: 191927 - DNA, 25 bp, Saccharomyces pastorianus
gtcgccaaatactgatacctcatca

SEQ ID NO: 191928 - DNA, 25 bp, Saccharomyces pastorianus
ataatagtcgccaaatactgatacc

SEQ ID NO: 191929 - DNA, 25 bp, Saccharomyces pastorianus
tcgccaaatactgatacctcatcaa

SEQ ID NO: 191930 - DNA, 25 bp, Saccharomyces pastorianus
ccaaatactgatacctcatcaaaat

SEQ ID NO: 191931 - DNA, 25 bp, Saccharomyces pastorianus
gaggacgactgctttactcgtgaaa

SEQ ID NO: 191932 - DNA, 25 bp, Saccharomyces pastorianus
agcatttttgccttgcatttcgtat

SEQ ID NO: 191933 - DNA, 25 bp, Saccharomyces pastorianus
tgttggcctggaagacgttcagctt

SEQ ID NO: 191934 - DNA, 25 bp, Saccharomyces pastorianus
gtatctgcgtgtcacagcatttttg

SEQ ID NO: 191935 - DNA, 25 bp, Saccharomyces pastorianus
ttgtgtcctggattgtttttcctca

SEQ ID NO: 191936 - DNA, 25 bp, Saccharomyces pastorianus
gtttttcctcatgatggtgtggctt

SEQ ID NO: 191937 - DNA, 25 bp, Saccharomyces pastorianus
tggtgtggcttttccaaaatatgag

SEQ ID NO: 191938 - DNA, 25 bp, Saccharomyces pastorianus
gatattcatcggtccaagcttactt

SEQ ID NO: 191939 - DNA, 25 bp, Saccharomyces pastorianus
atggcttgcttttttgaactgtatc

SEQ ID NO: 191940 - DNA, 25 bp, Saccharomyces pastorianus
aagacgttcagcttcccaaggatat

SEQ ID NO: 191941 - DNA, 25 bp, Saccharomyces pastorianus
ctatttactctctaccattatggct

SEQ ID NO: 191942 - DNA, 25 bp, Saccharomyces pastorianus
gttcgattcactgataagcaacttg

SEQ ID NO: 191943 - DNA, 25 bp, Saccharomyces pastorianus
aacaacctgaaatgttcgattcact

SEQ ID NO: 191944 - DNA, 25 bp, Saccharomyces pastorianus
ggaagtacataactatacgctatgg

SEQ ID NO: 191945 - DNA, 25 bp, Saccharomyces pastorianus
gccacatgtatattgaacaacctga

SEQ ID NO: 191946 - DNA, 25 bp, Saccharomyces pastorianus
gataagcaacttgaataatcagttt

SEQ ID NO: 191947 - DNA, 25 bp, Saccharomyces pastorianus
gatgactcgttgattaaaatcctaa

SEQ ID NO: 191948 - DNA, 25 bp, Saccharomyces pastorianus
aggatatgcttgatgatgactcgtt

SEQ ID NO: 191949 - DNA, 25 bp, Saccharomyces pastorianus
atgcttgatgatgactcgttgatta

SEQ ID NO: 191950 - DNA, 25 bp, Saccharomyces pastorianus
ggcagatatgatatttcaaagttca

SEQ ID NO: 191951 - DNA, 25 bp, Saccharomyces pastorianus
gaaatgttcgattcactgataagca

SEQ ID NO: 191952 - DNA, 25 bp, Saccharomyces pastorianus
atcctaatcttgttaacaaacatgg

SEQ ID NO: 191953 - DNA, 25 bp, Saccharomyces pastorianus
ggcacgaagttgttgtttttccaat

SEQ ID NO: 191954 - DNA, 25 bp, Saccharomyces pastorianus
gagggacctccttggtattgatctt

SEQ ID NO: 191955 - DNA, 25 bp, Saccharomyces pastorianus
atcaagtcctttaggctcttcttct

SEQ ID NO: 191956 - DNA, 25 bp, Saccharomyces pastorianus
attgatcttgttctcttactccttt

SEQ ID NO: 191957 - DNA, 25 bp, Saccharomyces pastorianus
acagtcttctttctacaacgttgat

SEQ ID NO: 191958 - DNA, 25 bp, Saccharomyces pastorianus
gccacctgtgttctcagacagattt

SEQ ID NO: 191959 - DNA, 25 bp, Saccharomyces pastorianus
tagcctgtcaagctctttcgaggga

SEQ ID NO: 191960 - DNA, 25 bp, Saccharomyces pastorianus
ttactccttttttggcgtccagata

SEQ ID NO: 191961 - DNA, 25 bp, Saccharomyces pastorianus
ccttggagggcttttcttcattgaa

SEQ ID NO: 191962 - DNA, 25 bp, Saccharomyces pastorianus
gtgcacaagctcttttcggcattat

SEQ ID NO: 191963 - DNA, 25 bp, Saccharomyces pastorianus
ttgctggagcaacttcggtgcacaa

SEQ ID NO: 191964 - DNA, 25 bp, Saccharomyces pastorianus
aaccaaccatattacaagtcacaaa

SEQ ID NO: 191965 - DNA, 25 bp, Saccharomyces pastorianus
gtaaccaaccatattacaagtcaca

SEQ ID NO: 191966 - DNA, 25 bp, Saccharomyces pastorianus
tggtaaccaaccatattacaagtca

SEQ ID NO: 191967 - DNA, 25 bp, Saccharomyces pastorianus
atggtaaccaaccatattacaagtc

SEQ ID NO: 191968 - DNA, 25 bp, Saccharomyces pastorianus
tatggtaaccaaccatattacaagt

SEQ ID NO: 191969 - DNA, 25 bp, Saccharomyces pastorianus
accaaccatattacaagtcacaaat

SEQ ID NO: 191970 - DNA, 25 bp, Saccharomyces pastorianus
ggtaaccaaccatattacaagtcac

SEQ ID NO: 191971 - DNA, 25 bp, Saccharomyces pastorianus
taaccaaccatattacaagtcacaa

SEQ ID NO: 191972 - DNA, 25 bp, Saccharomyces pastorianus
gagagtaacaataagcgcgatccat

SEQ ID NO: 191973 - DNA, 25 bp, Saccharomyces pastorianus
gtatagtacttctactacaatccat

SEQ ID NO: 191974 - DNA, 25 bp, Saccharomyces pastorianus
gcgcacaacccggagaatgatttgg

SEQ ID NO: 191975 - DNA, 25 bp, Saccharomyces pastorianus
aacccggagaatgatttggagagta

SEQ ID NO: 191976 - DNA, 25 bp, Saccharomyces pastorianus
tcagagagcgcacaacccggagaat

SEQ ID NO: 191977 - DNA, 25 bp, Saccharomyces pastorianus
aagcgcgatccattcgaagcgtata

SEQ ID NO: 191978 - DNA, 25 bp, Saccharomyces pastorianus
gatccattcgaagcgtatagtactt

SEQ ID NO: 191979 - DNA, 25 bp, Saccharomyces pastorianus
gagagcgcacaacccggagaatgat

SEQ ID NO: 191980 - DNA, 25 bp, Saccharomyces pastorianus
gaagcgtatagtacttctactacaa

SEQ ID NO: 191981 - DNA, 25 bp, Saccharomyces pastorianus
aaaactcagagagcgcacaacccgg

SEQ ID NO: 191982 - DNA, 25 bp, Saccharomyces pastorianus
aataagcgcgatccattcgaagcgt

SEQ ID NO: 191983 - DNA, 25 bp, Saccharomyces pastorianus
ttcgttttgtccttcgtgtaacaat

SEQ ID NO: 191984 - DNA, 25 bp, Saccharomyces pastorianus
ggtgagagtgcttactttttccaac

SEQ ID NO: 191985 - DNA, 25 bp, Saccharomyces pastorianus
tgatgttcttggtggtggttgggac

SEQ ID NO: 191986 - DNA, 25 bp, Saccharomyces pastorianus
gtatatacattagcatgccgttcat

SEQ ID NO: 191987 - DNA, 25 bp, Saccharomyces pastorianus
gtccttcgtgtaacaatatgctact

SEQ ID NO: 191988 - DNA, 25 bp, Saccharomyces pastorianus
tagcatgccgttcatgtccatatga

SEQ ID NO: 191989 - DNA, 25 bp, Saccharomyces pastorianus
tatgctactgataacgagtggcgat

SEQ ID NO: 191990 - DNA, 25 bp, Saccharomyces pastorianus
tttccaactacaaattaggtcagct

SEQ ID NO: 191991 - DNA, 25 bp, Saccharomyces pastorianus
atgccgttcatgtccatatgagttt

SEQ ID NO: 191992 - DNA, 25 bp, Saccharomyces pastorianus
gagtgcttactttttccaactacaa

SEQ ID NO: 191993 - DNA, 25 bp, Saccharomyces pastorianus
atgtccatatgagtttcctatagag

SEQ ID NO: 191994 - DNA, 25 bp, Saccharomyces pastorianus
aaccaaccatattacaagtcacaaa

SEQ ID NO: 191995 - DNA, 25 bp, Saccharomyces pastorianus
gtaaccaaccatattacaagtcaca

SEQ ID NO: 191996 - DNA, 25 bp, Saccharomyces pastorianus
tggtaaccaaccatattacaagtca

SEQ ID NO: 191997 - DNA, 25 bp, Saccharomyces pastorianus
atggtaaccaaccatattacaagtc

SEQ ID NO: 191998 - DNA, 25 bp, Saccharomyces pastorianus
tatggtaaccaaccatattacaagt

SEQ ID NO: 191999 - DNA, 25 bp, Saccharomyces pastorianus
accaaccatattacaagtcacaaat

SEQ ID NO: 192000 - DNA, 25 bp, Saccharomyces pastorianus
ggtaaccaaccatattacaagtcac

SEQ ID NO: 192001 - DNA, 25 bp, Saccharomyces pastorianus
taaccaaccatattacaagtcacaa

SEQ ID NO: 192002 - DNA, 25 bp, Saccharomyces pastorianus
actgactggaccgaacatagccaat

SEQ ID NO: 192003 - DNA, 25 bp, Saccharomyces pastorianus
cagttagatatggacagtgggagga

SEQ ID NO: 192004 - DNA, 25 bp, Saccharomyces pastorianus
gaactgactggaccgaacatagcca

SEQ ID NO: 192005 - DNA, 25 bp, Saccharomyces pastorianus
aggagggaaatggacagaactgact

SEQ ID NO: 192006 - DNA, 25 bp, Saccharomyces pastorianus
gaacatagccaatatttgggaacat

SEQ ID NO: 192007 - DNA, 25 bp, Saccharomyces pastorianus
gactggaccgaacatagccaatatt

SEQ ID NO: 192008 - DNA, 25 bp, Saccharomyces pastorianus
cagaactgactggaccgaacatagc

SEQ ID NO: 192009 - DNA, 25 bp, Saccharomyces pastorianus
tgactggaccgaacatagccaatat

SEQ ID NO: 192010 - DNA, 25 bp, Saccharomyces pastorianus
ggaaatggacagaactgactggacc

SEQ ID NO: 192011 - DNA, 25 bp, Saccharomyces pastorianus
gccaatatttgggaacatataggga

SEQ ID NO: 192012 - DNA, 25 bp, Saccharomyces pastorianus
ggaccgaacatagccaatatttggg

SEQ ID NO: 192013 - DNA, 25 bp, Saccharomyces pastorianus
aaccaaccatattacaagtcacaaa

SEQ ID NO: 192014 - DNA, 25 bp, Saccharomyces pastorianus
gtaaccaaccatattacaagtcaca

SEQ ID NO: 192015 - DNA, 25 bp, Saccharomyces pastorianus
tggtaaccaaccatattacaagtca

SEQ ID NO: 192016 - DNA, 25 bp, Saccharomyces pastorianus
atggtaaccaaccatattacaagtc

SEQ ID NO: 192017 - DNA, 25 bp, Saccharomyces pastorianus
tatggtaaccaaccatattacaagt

SEQ ID NO: 192018 - DNA, 25 bp, Saccharomyces pastorianus
accaaccatattacaagtcacaaat

SEQ ID NO: 192019 - DNA, 25 bp, Saccharomyces pastorianus
ggtaaccaaccatattacaagtcac

SEQ ID NO: 192020 - DNA, 25 bp, Saccharomyces pastorianus
taaccaaccatattacaagtcacaa

SEQ ID NO: 192021 - DNA, 25 bp, Saccharomyces pastorianus
aaccaaccatattacaagtcacaaa

SEQ ID NO: 192022 - DNA, 25 bp, Saccharomyces pastorianus
gtaaccaaccatattacaagtcaca

SEQ ID NO: 192023 - DNA, 25 bp, Saccharomyces pastorianus
tggtaaccaaccatattacaagtca

SEQ ID NO: 192024 - DNA, 25 bp, Saccharomyces pastorianus
atggtaaccaaccatattacaagtc

SEQ ID NO: 192025 - DNA, 25 bp, Saccharomyces pastorianus
tatggtaaccaaccatattacaagt

SEQ ID NO: 192026 - DNA, 25 bp, Saccharomyces pastorianus
accaaccatattacaagtcacaaat

SEQ ID NO: 192027 - DNA, 25 bp, Saccharomyces pastorianus
ggtaaccaaccatattacaagtcac

SEQ ID NO: 192028 - DNA, 25 bp, Saccharomyces pastorianus
taaccaaccatattacaagtcacaa

SEQ ID NO: 192029 - DNA, 25 bp, Saccharomyces pastorianus
acattgagctttactgcacgttccc

SEQ ID NO: 192030 - DNA, 25 bp, Saccharomyces pastorianus
gtccttagctcgaacaacgccgata

SEQ ID NO: 192031 - DNA, 25 bp, Saccharomyces pastorianus
aacgccgataggcatcaagttacat

SEQ ID NO: 192032 - DNA, 25 bp, Saccharomyces pastorianus
ggctaactatcgacgttcacccttc

SEQ ID NO: 192033 - DNA, 25 bp, Saccharomyces pastorianus
tatcacatcgtccttagctcgaaca

SEQ ID NO: 192034 - DNA, 25 bp, Saccharomyces pastorianus
gttcacaacggctaactatcgacgt

SEQ ID NO: 192035 - DNA, 25 bp, Saccharomyces pastorianus
tttactgcacgttcccgcatgatgc

SEQ ID NO: 192036 - DNA, 25 bp, Saccharomyces pastorianus
acgttcccgcatgatgccattgact

SEQ ID NO: 192037 - DNA, 25 bp, Saccharomyces pastorianus
atcacttttatttagttcacaacgg

SEQ ID NO: 192038 - DNA, 25 bp, Saccharomyces pastorianus
taggcatcaagttacattgagcttt

SEQ ID NO: 192039 - DNA, 25 bp, Saccharomyces pastorianus
tagctcgaacaacgccgataggcat

SEQ ID NO: 192040 - DNA, 25 bp, Saccharomyces pastorianus
gcaacatttgataatgatgctatga

SEQ ID NO: 192041 - DNA, 25 bp, Saccharomyces pastorianus
gatgacataaatactcctgaaagtt

SEQ ID NO: 192042 - DNA, 25 bp, Saccharomyces pastorianus
ccgtttagtgttatcgatgggttgt

SEQ ID NO: 192043 - DNA, 25 bp, Saccharomyces pastorianus
ttcacgggaaaatcaaaaaggagat

SEQ ID NO: 192044 - DNA, 25 bp, Saccharomyces pastorianus
ctcctgaaagtttgagctcatgctc

SEQ ID NO: 192045 - DNA, 25 bp, Saccharomyces pastorianus
gtgataaaccgtttagtgttatcga

SEQ ID NO: 192046 - DNA, 25 bp, Saccharomyces pastorianus
tactcctgaaagtttgagctcatgc

SEQ ID NO: 192047 - DNA, 25 bp, Saccharomyces pastorianus
gtttgagctcatgctcaagctcagt

SEQ ID NO: 192048 - DNA, 25 bp, Saccharomyces pastorianus
gaaagtttgagctcatgctcaagct

SEQ ID NO: 192049 - DNA, 25 bp, Saccharomyces pastorianus
gtgatgacataaatactcctgaaag

SEQ ID NO: 192050 - DNA, 25 bp, Saccharomyces pastorianus
aaggagatgcaacatttgataatga

SEQ ID NO: 192051 - DNA, 25 bp, Saccharomyces pastorianus
ccaaggtggtgttttgccaaacatc

SEQ ID NO: 192052 - DNA, 25 bp, Saccharomyces pastorianus
tagggataacaagaagaccagaatt

SEQ ID NO: 192053 - DNA, 25 bp, Saccharomyces pastorianus
gaagaccagaattattccaagacat

SEQ ID NO: 192054 - DNA, 25 bp, Saccharomyces pastorianus
tttgccaaacatccatcaaaacttg

SEQ ID NO: 192055 - DNA, 25 bp, Saccharomyces pastorianus
gactgctgtcttggaatatttggcc

SEQ ID NO: 192056 - DNA, 25 bp, Saccharomyces pastorianus
ggtgttttgccaaacatccatcaaa

SEQ ID NO: 192057 - DNA, 25 bp, Saccharomyces pastorianus
acaagctattgggtaacgttaccat

SEQ ID NO: 192058 - DNA, 25 bp, Saccharomyces pastorianus
agtctacttgactgctgtcttggaa

SEQ ID NO: 192059 - DNA, 25 bp, Saccharomyces pastorianus
atgctgctagggataacaagaagac

SEQ ID NO: 192060 - DNA, 25 bp, Saccharomyces pastorianus
aaggctggtttgacattcccagtcg

SEQ ID NO: 192061 - DNA, 25 bp, Saccharomyces pastorianus
gacgaattgaacaagctattgggta

SEQ ID NO: 192062 - DNA, 25 bp, Saccharomyces pastorianus
ctaggcgaaagtgatgaggaaattc

SEQ ID NO: 192063 - DNA, 25 bp, Saccharomyces pastorianus
gtgacaatttgtttattcgtagatg

SEQ ID NO: 192064 - DNA, 25 bp, Saccharomyces pastorianus
taaatctaggcgaaagtgatgagga

SEQ ID NO: 192065 - DNA, 25 bp, Saccharomyces pastorianus
gacaatttgtttattcgtagatgat

SEQ ID NO: 192066 - DNA, 25 bp, Saccharomyces pastorianus
cagtcaagtgacaatttgtttattc

SEQ ID NO: 192067 - DNA, 25 bp, Saccharomyces pastorianus
ttgtttattcgtagatgatatggta

SEQ ID NO: 192068 - DNA, 25 bp, Saccharomyces pastorianus
gcttaagatgcaatacgacaccaag

SEQ ID NO: 192069 - DNA, 25 bp, Saccharomyces pastorianus
agtgacaatttgtttattcgtagat

SEQ ID NO: 192070 - DNA, 25 bp, Saccharomyces pastorianus
aaaacagtcaagtgacaatttgttt

SEQ ID NO: 192071 - DNA, 25 bp, Saccharomyces pastorianus
aagcttaagatgcaatacgacacca

SEQ ID NO: 192072 - DNA, 25 bp, Saccharomyces pastorianus
gtgatgaggaaattcaatatgacat

SEQ ID NO: 192073 - DNA, 25 bp, Saccharomyces pastorianus
gcaaacctgttaagccaacaaataa

SEQ ID NO: 192074 - DNA, 25 bp, Saccharomyces pastorianus
ggaatacgagagataagcaattaat

SEQ ID NO: 192075 - DNA, 25 bp, Saccharomyces pastorianus
gcacaaaagcaaacctgttaagcca

SEQ ID NO: 192076 - DNA, 25 bp, Saccharomyces pastorianus
atggcacaaaagcaaacctgttaag

SEQ ID NO: 192077 - DNA, 25 bp, Saccharomyces pastorianus
tggcacaaaagcaaacctgttaagc

SEQ ID NO: 192078 - DNA, 25 bp, Saccharomyces pastorianus
gaattgatacagttcatatggaata

SEQ ID NO: 192079 - DNA, 25 bp, Saccharomyces pastorianus
gatacagttcatatggaatacgaga

SEQ ID NO: 192080 - DNA, 25 bp, Saccharomyces pastorianus
acagttcatatggaatacgagagat

SEQ ID NO: 192081 - DNA, 25 bp, Saccharomyces pastorianus
caaaagcaaacctgttaagccaaca

SEQ ID NO: 192082 - DNA, 25 bp, Saccharomyces pastorianus
tatggaatacgagagataagcaatt

SEQ ID NO: 192083 - DNA, 25 bp, Saccharomyces pastorianus
aagcaaacctgttaagccaacaaat

SEQ ID NO: 192084 - DNA, 25 bp, Saccharomyces pastorianus
tgaccaagccaagccagataaaatc

SEQ ID NO: 192085 - DNA, 25 bp, Saccharomyces pastorianus
gaaagggaagaaatcttgacttctt

SEQ ID NO: 192086 - DNA, 25 bp, Saccharomyces pastorianus
gtgaaatgctgggtactatggtaaa

SEQ ID NO: 192087 - DNA, 25 bp, Saccharomyces pastorianus
gattctgtccagcaagccaaaaatt

SEQ ID NO: 192088 - DNA, 25 bp, Saccharomyces pastorianus
agtaggtactgattctgtccagcaa

SEQ ID NO: 192089 - DNA, 25 bp, Saccharomyces pastorianus
tctttattatctccaagtgtgacac

SEQ ID NO: 192090 - DNA, 25 bp, Saccharomyces pastorianus
gtccagcaagccaaaaattttaatg

SEQ ID NO: 192091 - DNA, 25 bp, Saccharomyces pastorianus
ttggagaggctttagtaggtactga

SEQ ID NO: 192092 - DNA, 25 bp, Saccharomyces pastorianus
gtactgattctgtccagcaagccaa

SEQ ID NO: 192093 - DNA, 25 bp, Saccharomyces pastorianus
agccaagccagataaaatcattatg

SEQ ID NO: 192094 - DNA, 25 bp, Saccharomyces pastorianus
tttaatgatgccttcggaaagggaa

SEQ ID NO: 192095 - DNA, 25 bp, Saccharomyces pastorianus
gaacgtagatcatgatcgtccacct

SEQ ID NO: 192096 - DNA, 25 bp, Saccharomyces pastorianus
gtatgtgaggaaaacccctctgatg

SEQ ID NO: 192097 - DNA, 25 bp, Saccharomyces pastorianus
atcgtccacctgtgtatgtgaggaa

SEQ ID NO: 192098 - DNA, 25 bp, Saccharomyces pastorianus
aaaacccctctgatgacatttccat

SEQ ID NO: 192099 - DNA, 25 bp, Saccharomyces pastorianus
ccctctgatgacatttccataccat

SEQ ID NO: 192100 - DNA, 25 bp, Saccharomyces pastorianus
catgatcgtccacctgtgtatgtga

SEQ ID NO: 192101 - DNA, 25 bp, Saccharomyces pastorianus
aaaaaccgtatcattctccgatgac

SEQ ID NO: 192102 - DNA, 25 bp, Saccharomyces pastorianus
tagatcatgatcgtccacctgtgta

SEQ ID NO: 192103 - DNA, 25 bp, Saccharomyces pastorianus
taacaacgcaccaaaatcgtgagaa

SEQ ID NO: 192104 - DNA, 25 bp, Saccharomyces pastorianus
gacacaacattaacaacgcaccaaa

SEQ ID NO: 192105 - DNA, 25 bp, Saccharomyces pastorianus
gtatcattctccgatgacacaacat

SEQ ID NO: 192106 - DNA, 25 bp, Saccharomyces pastorianus
ttcaaggtggcgatttcactcacag

SEQ ID NO: 192107 - DNA, 25 bp, Saccharomyces pastorianus
gaaacacgttcaaagatgagaattt

SEQ ID NO: 192108 - DNA, 25 bp, Saccharomyces pastorianus
tcaaggtggcgatttcactcacaga

SEQ ID NO: 192109 - DNA, 25 bp, Saccharomyces pastorianus
aaggtggcgatttcactcacagatc

SEQ ID NO: 192110 - DNA, 25 bp, Saccharomyces pastorianus
atgattcaaggtggcgatttcactc

SEQ ID NO: 192111 - DNA, 25 bp, Saccharomyces pastorianus
gtggcgatttcactcacagatcagg

SEQ ID NO: 192112 - DNA, 25 bp, Saccharomyces pastorianus
attcaaggtggcgatttcactcaca

SEQ ID NO: 192113 - DNA, 25 bp, Saccharomyces pastorianus
caaggtggcgatttcactcacagat

SEQ ID NO: 192114 - DNA, 25 bp, Saccharomyces pastorianus
aggtggcgatttcactcacagatca

SEQ ID NO: 192115 - DNA, 25 bp, Saccharomyces pastorianus
ggtggcgatttcactcacagatcag

SEQ ID NO: 192116 - DNA, 25 bp, Saccharomyces pastorianus
aacacgttcaaagatgagaattttg

SEQ ID NO: 192117 - DNA, 25 bp, Saccharomyces pastorianus
gacctgaggccggacagtcggtacc

SEQ ID NO: 192118 - DNA, 25 bp, Saccharomyces pastorianus
catccaagatggacctgaggccgga

SEQ ID NO: 192119 - DNA, 25 bp, Saccharomyces pastorianus
taactatatggagaccttataatct

SEQ ID NO: 192120 - DNA, 25 bp, Saccharomyces pastorianus
aggctgactctatcaacgttgccat

SEQ ID NO: 192121 - DNA, 25 bp, Saccharomyces pastorianus
gactttacagttaatacatagattt

SEQ ID NO: 192122 - DNA, 25 bp, Saccharomyces pastorianus
gtggcaatataaggctgactctatc

SEQ ID NO: 192123 - DNA, 25 bp, Saccharomyces pastorianus
tctatcaacgttgccatccaagatg

SEQ ID NO: 192124 - DNA, 25 bp, Saccharomyces pastorianus
tgactctatcaacgttgccatccaa

SEQ ID NO: 192125 - DNA, 25 bp, Saccharomyces pastorianus
aagatggacctgaggccggacagtc

SEQ ID NO: 192126 - DNA, 25 bp, Saccharomyces pastorianus
gattatttcaagactttacagttaa

SEQ ID NO: 192127 - DNA, 25 bp, Saccharomyces pastorianus
ataaggctgactctatcaacgttgc

SEQ ID NO: 192128 - DNA, 25 bp, Saccharomyces pastorianus
tatgttttgttagttgttccagaaa

SEQ ID NO: 192129 - DNA, 25 bp, Saccharomyces pastorianus
ttgtatggttgtctatgcttccgtg

SEQ ID NO: 192130 - DNA, 25 bp, Saccharomyces pastorianus
cgttgttgagagatatggtcgtcgt

SEQ ID NO: 192131 - DNA, 25 bp, Saccharomyces pastorianus
cttcatgttcttctatgttttgtta

SEQ ID NO: 192132 - DNA, 25 bp, Saccharomyces pastorianus
caattccttatgtcgttgtttctga

SEQ ID NO: 192133 - DNA, 25 bp, Saccharomyces pastorianus
gggctgtttggtcttcatgttcttc

SEQ ID NO: 192134 - DNA, 25 bp, Saccharomyces pastorianus
ctttgttggtatttacgttgttgag

SEQ ID NO: 192135 - DNA, 25 bp, Saccharomyces pastorianus
ttttgctactacatgggctccaatt

SEQ ID NO: 192136 - DNA, 25 bp, Saccharomyces pastorianus
gtctaaggctatgtctattgctaca

SEQ ID NO: 192137 - DNA, 25 bp, Saccharomyces pastorianus
gcttccgtgggtgtcaccagattat

SEQ ID NO: 192138 - DNA, 25 bp, Saccharomyces pastorianus
attgctacagctgctaattggttgt

SEQ ID NO: 192139 - DNA, 25 bp, Saccharomyces pastorianus
aataagcaacacacaccgaaacagg

SEQ ID NO: 192140 - DNA, 25 bp, Saccharomyces pastorianus
cccctgctactacttggaaattaat

SEQ ID NO: 192141 - DNA, 25 bp, Saccharomyces pastorianus
agaaattccgaacacaagcctaaga

SEQ ID NO: 192142 - DNA, 25 bp, Saccharomyces pastorianus
tgtcctggacattttttccttcctt

SEQ ID NO: 192143 - DNA, 25 bp, Saccharomyces pastorianus
gaagacaccgcagttgttgcaacat

SEQ ID NO: 192144 - DNA, 25 bp, Saccharomyces pastorianus
gacaccaacacattttttcatgagt

SEQ ID NO: 192145 - DNA, 25 bp, Saccharomyces pastorianus
ttagcttactcagacaccaacacat

SEQ ID NO: 192146 - DNA, 25 bp, Saccharomyces pastorianus
tttgacttttgccacacagctgcac

SEQ ID NO: 192147 - DNA, 25 bp, Saccharomyces pastorianus
taagttttcgggttgaatggcatca

SEQ ID NO: 192148 - DNA, 25 bp, Saccharomyces pastorianus
aaatctttccatgcttatcagccgg

SEQ ID NO: 192149 - DNA, 25 bp, Saccharomyces pastorianus
acaacggctgctgtgatgccgcaaa

SEQ ID NO: 192150 - DNA, 25 bp, Saccharomyces pastorianus
aagggcattcatctgctggttatgg

SEQ ID NO: 192151 - DNA, 25 bp, Saccharomyces pastorianus
tgggattggaatacgtcgcgcttat

SEQ ID NO: 192152 - DNA, 25 bp, Saccharomyces pastorianus
agcagactatttacttgggattgga

SEQ ID NO: 192153 - DNA, 25 bp, Saccharomyces pastorianus
ggctttttctggtgatggtcgttac

SEQ ID NO: 192154 - DNA, 25 bp, Saccharomyces pastorianus
taacatcaagattccaggcaacaag

SEQ ID NO: 192155 - DNA, 25 bp, Saccharomyces pastorianus
gatggtcgttacatatgttcaggcg

SEQ ID NO: 192156 - DNA, 25 bp, Saccharomyces pastorianus
gaatacgtcgcgcttattaaataac

SEQ ID NO: 192157 - DNA, 25 bp, Saccharomyces pastorianus
gttcaggcgattcaaaaagcagact

SEQ ID NO: 192158 - DNA, 25 bp, Saccharomyces pastorianus
aacaagtaaagtcatttgcagcgga

SEQ ID NO: 192159 - DNA, 25 bp, Saccharomyces pastorianus
ctggttatgggataagcttggcttt

SEQ ID NO: 192160 - DNA, 25 bp, Saccharomyces pastorianus
ggcaacaagcctataactcaagtgg

SEQ ID NO: 192161 - DNA, 25 bp, Saccharomyces pastorianus
aaccaaccatattacaagtcacaaa

SEQ ID NO: 192162 - DNA, 25 bp, Saccharomyces pastorianus
gtaaccaaccatattacaagtcaca

SEQ ID NO: 192163 - DNA, 25 bp, Saccharomyces pastorianus
tggtaaccaaccatattacaagtca

SEQ ID NO: 192164 - DNA, 25 bp, Saccharomyces pastorianus
atggtaaccaaccatattacaagtc

SEQ ID NO: 192165 - DNA, 25 bp, Saccharomyces pastorianus
tatggtaaccaaccatattacaagt

SEQ ID NO: 192166 - DNA, 25 bp, Saccharomyces pastorianus
accaaccatattacaagtcacaaat

SEQ ID NO: 192167 - DNA, 25 bp, Saccharomyces pastorianus
ggtaaccaaccatattacaagtcac

SEQ ID NO: 192168 - DNA, 25 bp, Saccharomyces pastorianus
taaccaaccatattacaagtcacaa

SEQ ID NO: 192169 - DNA, 25 bp, Saccharomyces pastorianus
aaggctacacacctaccaaaggata

SEQ ID NO: 192170 - DNA, 25 bp, Saccharomyces pastorianus
aaatgaactcgttaccatctcctgg

SEQ ID NO: 192171 - DNA, 25 bp, Saccharomyces pastorianus
gacagactggttgaatggaacgatc

SEQ ID NO: 192172 - DNA, 25 bp, Saccharomyces pastorianus
actcgttaccatctcctgggtccaa

SEQ ID NO: 192173 - DNA, 25 bp, Saccharomyces pastorianus
gggttctattgaccaagtaaatgaa

SEQ ID NO: 192174 - DNA, 25 bp, Saccharomyces pastorianus
tattaggatgctttcatttgaagat

SEQ ID NO: 192175 - DNA, 25 bp, Saccharomyces pastorianus
ttgggtctattaaagggttctattg

SEQ ID NO: 192176 - DNA, 25 bp, Saccharomyces pastorianus
agagccataagtttgggtctattaa

SEQ ID NO: 192177 - DNA, 25 bp, Saccharomyces pastorianus
aggataatgtcgaacacctggtcat

SEQ ID NO: 192178 - DNA, 25 bp, Saccharomyces pastorianus
cgaacacctggtcatgagagccata

SEQ ID NO: 192179 - DNA, 25 bp, Saccharomyces pastorianus
gaagatatttcaaaggctacacacc

SEQ ID NO: 192180 - DNA, 25 bp, Saccharomyces pastorianus
gaggcggatatggtggctccagagg

SEQ ID NO: 192181 - DNA, 25 bp, Saccharomyces pastorianus
tccagaggcggatatggtggctcca

SEQ ID NO: 192182 - DNA, 25 bp, Saccharomyces pastorianus
cccagaggtggatttggtggtccaa

SEQ ID NO: 192183 - DNA, 25 bp, Saccharomyces pastorianus
aggcggcttcggtggccccagaggt

SEQ ID NO: 192184 - DNA, 25 bp, Saccharomyces pastorianus
tggtcctccaagagatgcatacaga

SEQ ID NO: 192185 - DNA, 25 bp, Saccharomyces pastorianus
attatggtcctccaagagatgcata

SEQ ID NO: 192186 - DNA, 25 bp, Saccharomyces pastorianus
agaggcggtttctccagaggcggct

SEQ ID NO: 192187 - DNA, 25 bp, Saccharomyces pastorianus
tcctccaccaatcagaagatcaaat

SEQ ID NO: 192188 - DNA, 25 bp, Saccharomyces pastorianus
aggcggtttctccagaggcggcttc

SEQ ID NO: 192189 - DNA, 25 bp, Saccharomyces pastorianus
tatggtcctccaagagatgcataca

SEQ ID NO: 192190 - DNA, 25 bp, Saccharomyces pastorianus
cgattatggtcctccaagagatgca

SEQ ID NO: 192191 - DNA, 25 bp, Saccharomyces pastorianus
aaagctaaatccacttctcttttat

SEQ ID NO: 192192 - DNA, 25 bp, Saccharomyces pastorianus
atccacttctcttttatttcaaaat

SEQ ID NO: 192193 - DNA, 25 bp, Saccharomyces pastorianus
acgaccaatcgtgtcgatctgcaaa

SEQ ID NO: 192194 - DNA, 25 bp, Saccharomyces pastorianus
cactgagttgaacagatagctatct

SEQ ID NO: 192195 - DNA, 25 bp, Saccharomyces pastorianus
atgtaatttatcagtgttcaacact

SEQ ID NO: 192196 - DNA, 25 bp, Saccharomyces pastorianus
gtgtcgatctgcaaaaaaggcacat

SEQ ID NO: 192197 - DNA, 25 bp, Saccharomyces pastorianus
gggagcaccacattcacgaccaatc

SEQ ID NO: 192198 - DNA, 25 bp, Saccharomyces pastorianus
acaaattttcgtattatcgtagctg

SEQ ID NO: 192199 - DNA, 25 bp, Saccharomyces pastorianus
gtaggaggtaccaattgtgccagta

SEQ ID NO: 192200 - DNA, 25 bp, Saccharomyces pastorianus
ttcgtattatcgtagctgtcgttgt

SEQ ID NO: 192201 - DNA, 25 bp, Saccharomyces pastorianus
taatcaatgttaactttccagggaa

SEQ ID NO: 192202 - DNA, 25 bp, Saccharomyces pastorianus
tttagttttttcattactatggtat

SEQ ID NO: 192203 - DNA, 25 bp, Saccharomyces pastorianus
tactatggtattttttggtgggtgg

SEQ ID NO: 192204 - DNA, 25 bp, Saccharomyces pastorianus
ttagttttttcattactatggtatt

SEQ ID NO: 192205 - DNA, 25 bp, Saccharomyces pastorianus
tatttagttttttcattactatggt

SEQ ID NO: 192206 - DNA, 25 bp, Saccharomyces pastorianus
attatttagttttttcattactatg

SEQ ID NO: 192207 - DNA, 25 bp, Saccharomyces pastorianus
ttatttagttttttcattactatgg

SEQ ID NO: 192208 - DNA, 25 bp, Saccharomyces pastorianus
tttttcattactatggtattttttg

SEQ ID NO: 192209 - DNA, 25 bp, Saccharomyces pastorianus
tgaattatttagttttttcattact

SEQ ID NO: 192210 - DNA, 25 bp, Saccharomyces pastorianus
tagttttttcattactatggtattt

SEQ ID NO: 192211 - DNA, 25 bp, Saccharomyces pastorianus
ttactatggtattttttggtgggtg

SEQ ID NO: 192212 - DNA, 25 bp, Saccharomyces pastorianus
ttttcattactatggtattttttgg

SEQ ID NO: 192213 - DNA, 25 bp, Saccharomyces pastorianus
acaaatgcactcacatcattataca

SEQ ID NO: 192214 - DNA, 25 bp, Saccharomyces pastorianus
taaatcagtacaaatgcactcacat

SEQ ID NO: 192215 - DNA, 25 bp, Saccharomyces pastorianus
ttataccgcttttacaccgtatact

SEQ ID NO: 192216 - DNA, 25 bp, Saccharomyces pastorianus
aatcagtacaaatgcactcacatca

SEQ ID NO: 192217 - DNA, 25 bp, Saccharomyces pastorianus
atcagtacaaatgcactcacatcat

SEQ ID NO: 192218 - DNA, 25 bp, Saccharomyces pastorianus
gtacaaatgcactcacatcattata

SEQ ID NO: 192219 - DNA, 25 bp, Saccharomyces pastorianus
ccaatattacagaaaaatcaccacc

SEQ ID NO: 192220 - DNA, 25 bp, Saccharomyces pastorianus
aaatcagtacaaatgcactcacatc

SEQ ID NO: 192221 - DNA, 25 bp, Saccharomyces pastorianus
gcttttacaccgtatactaaccact

SEQ ID NO: 192222 - DNA, 25 bp, Saccharomyces pastorianus
catacgttataccgcttttacaccg

SEQ ID NO: 192223 - DNA, 25 bp, Saccharomyces pastorianus
tataccgcttttacaccgtatacta

SEQ ID NO: 192224 - DNA, 25 bp, Saccharomyces pastorianus
cacccacaccagagagaagcctaag

SEQ ID NO: 192225 - DNA, 25 bp, Saccharomyces pastorianus
tgtgtactaccaccaaccgaccgtc

SEQ ID NO: 192226 - DNA, 25 bp, Saccharomyces pastorianus
gagagaagcctaagcctaagactaa

SEQ ID NO: 192227 - DNA, 25 bp, Saccharomyces pastorianus
gaagcctaagcctaagactaagaca

SEQ ID NO: 192228 - DNA, 25 bp, Saccharomyces pastorianus
taagactaagacaagccaagcctga

SEQ ID NO: 192229 - DNA, 25 bp, Saccharomyces pastorianus
gacaagccaagcctgaccaacctgt

SEQ ID NO: 192230 - DNA, 25 bp, Saccharomyces pastorianus
taccctgactcattcaactatacca

SEQ ID NO: 192231 - DNA, 25 bp, Saccharomyces pastorianus
actaagacaagccaagcctgaccaa

SEQ ID NO: 192232 - DNA, 25 bp, Saccharomyces pastorianus
cacaccagagagaagcctaagccta

SEQ ID NO: 192233 - DNA, 25 bp, Saccharomyces pastorianus
tgtctctcaaattaccctccattac

SEQ ID NO: 192234 - DNA, 25 bp, Saccharomyces pastorianus
tcgttaccctgactcattcaactat

SEQ ID NO: 192235 - DNA, 25 bp, Saccharomyces pastorianus
atatggatggcactggtgtttccag

SEQ ID NO: 192236 - DNA, 25 bp, Saccharomyces pastorianus
atcctaacattgatatcgcatcggg

SEQ ID NO: 192237 - DNA, 25 bp, Saccharomyces pastorianus
gtagagttgccggataattacccat

SEQ ID NO: 192238 - DNA, 25 bp, Saccharomyces pastorianus
gttcgttaacaagatattccatcct

SEQ ID NO: 192239 - DNA, 25 bp, Saccharomyces pastorianus
taattacccatacaagtcgccaagc

SEQ ID NO: 192240 - DNA, 25 bp, Saccharomyces pastorianus
gtttccagtggcgatgatagcgtag

SEQ ID NO: 192241 - DNA, 25 bp, Saccharomyces pastorianus
tgatagcggcggtgatttacaagaa

SEQ ID NO: 192242 - DNA, 25 bp, Saccharomyces pastorianus
gagcctaatggtagcgatcccttga

SEQ ID NO: 192243 - DNA, 25 bp, Saccharomyces pastorianus
gtttcatgtaaagttcttgggacca

SEQ ID NO: 192244 - DNA, 25 bp, Saccharomyces pastorianus
caagtcgccaagcatagggttcgtt

SEQ ID NO: 192245 - DNA, 25 bp, Saccharomyces pastorianus
gaagctgccacattgcaattacgag

SEQ ID NO: 192246 - DNA, 25 bp, Saccharomyces pastorianus
aagggtatcgtaatcctttctattg

SEQ ID NO: 192247 - DNA, 25 bp, Saccharomyces pastorianus
catctacgtgtaggctgccaaattg

SEQ ID NO: 192248 - DNA, 25 bp, Saccharomyces pastorianus
tctacgtgtaggctgccaaattgta

SEQ ID NO: 192249 - DNA, 25 bp, Saccharomyces pastorianus
tcatctacgtgtaggctgccaaatt

SEQ ID NO: 192250 - DNA, 25 bp, Saccharomyces pastorianus
ctacgtgtaggctgccaaattgtac

SEQ ID NO: 192251 - DNA, 25 bp, Saccharomyces pastorianus
tacgtgtaggctgccaaattgtacc

SEQ ID NO: 192252 - DNA, 25 bp, Saccharomyces pastorianus
atctacgtgtaggctgccaaattgt

SEQ ID NO: 192253 - DNA, 25 bp, Saccharomyces pastorianus
ctcatctacgtgtaggctgccaaat

SEQ ID NO: 192254 - DNA, 25 bp, Saccharomyces pastorianus
atcactggtgtgcactgtgacgcta

SEQ ID NO: 192255 - DNA, 25 bp, Saccharomyces pastorianus
gttgtttgtacaatcactggtgtgc

SEQ ID NO: 192256 - DNA, 25 bp, Saccharomyces pastorianus
acatgaactttgtgatgttgtttgt

SEQ ID NO: 192257 - DNA, 25 bp, Saccharomyces pastorianus
tactgcgcgtcctcgattttgatga

SEQ ID NO: 192258 - DNA, 25 bp, Saccharomyces pastorianus
ggtgtgcactgtgacgctatgtatc

SEQ ID NO: 192259 - DNA, 25 bp, Saccharomyces pastorianus
tgaatggacggaatcagtggccaac

SEQ ID NO: 192260 - DNA, 25 bp, Saccharomyces pastorianus
ggccggcttcaatcttatcttactg

SEQ ID NO: 192261 - DNA, 25 bp, Saccharomyces pastorianus
gcgcgtcctcgattttgatgacagt

SEQ ID NO: 192262 - DNA, 25 bp, Saccharomyces pastorianus
actctgggccggcttcaatcttatc

SEQ ID NO: 192263 - DNA, 25 bp, Saccharomyces pastorianus
ggttaacctggacaactttaacatg

SEQ ID NO: 192264 - DNA, 25 bp, Saccharomyces pastorianus
gcttcaatcttatcttactgcgcgt

SEQ ID NO: 192265 - DNA, 25 bp, Saccharomyces pastorianus
gttcttaaaatccacaaggcctatg

SEQ ID NO: 192266 - DNA, 25 bp, Saccharomyces pastorianus
taacttatcacccagatctcgtagt

SEQ ID NO: 192267 - DNA, 25 bp, Saccharomyces pastorianus
gatgatccgaattgtgaagcccact

SEQ ID NO: 192268 - DNA, 25 bp, Saccharomyces pastorianus
atccgtcctgggatacagagggctt

SEQ ID NO: 192269 - DNA, 25 bp, Saccharomyces pastorianus
aaggcctatgggtcttatcatctcc

SEQ ID NO: 192270 - DNA, 25 bp, Saccharomyces pastorianus
atctccctctctgtttctaataact

SEQ ID NO: 192271 - DNA, 25 bp, Saccharomyces pastorianus
tgtgcacacagtttgtccagctagg

SEQ ID NO: 192272 - DNA, 25 bp, Saccharomyces pastorianus
attgtgaagcccacttttcgtactt

SEQ ID NO: 192273 - DNA, 25 bp, Saccharomyces pastorianus
ttatcgatccgcttatgtgcacaca

SEQ ID NO: 192274 - DNA, 25 bp, Saccharomyces pastorianus
tttcgtacttcactaatccgtcctg

SEQ ID NO: 192275 - DNA, 25 bp, Saccharomyces pastorianus
agatctcgtagtgggcccatggcag

SEQ ID NO: 192276 - DNA, 25 bp, Saccharomyces pastorianus
gaactccttcctattgaaacatttc

SEQ ID NO: 192277 - DNA, 25 bp, Saccharomyces pastorianus
aagagcagccacttttaaccctgat

SEQ ID NO: 192278 - DNA, 25 bp, Saccharomyces pastorianus
gaaacatttcgtactaacatatttt

SEQ ID NO: 192279 - DNA, 25 bp, Saccharomyces pastorianus
atcaataacttattctgcgcgaaat

SEQ ID NO: 192280 - DNA, 25 bp, Saccharomyces pastorianus
cccgtttttgtaatccactatcaat

SEQ ID NO: 192281 - DNA, 25 bp, Saccharomyces pastorianus
cattttcaaatagacaacacccgtt

SEQ ID NO: 192282 - DNA, 25 bp, Saccharomyces pastorianus
gagctaataatctcaatctgtgtta

SEQ ID NO: 192283 - DNA, 25 bp, Saccharomyces pastorianus
tagttatcaaaagcaatttaccccg

SEQ ID NO: 192284 - DNA, 25 bp, Saccharomyces pastorianus
tgcgcgaaatattgtgtccagaaat

SEQ ID NO: 192285 - DNA, 25 bp, Saccharomyces pastorianus
taaccctgatactgactagagctaa

SEQ ID NO: 192286 - DNA, 25 bp, Saccharomyces pastorianus
ttttctcgaactccttcctattgaa

SEQ ID NO: 192287 - DNA, 25 bp, Saccharomyces pastorianus
cccaacctggaagtcatattatgat

SEQ ID NO: 192288 - DNA, 25 bp, Saccharomyces pastorianus
aattgggagcatctacctatcggta

SEQ ID NO: 192289 - DNA, 25 bp, Saccharomyces pastorianus
ttgttggctctttcaactgttgcta

SEQ ID NO: 192290 - DNA, 25 bp, Saccharomyces pastorianus
gggcgttcatcatctataacattgt

SEQ ID NO: 192291 - DNA, 25 bp, Saccharomyces pastorianus
aatgtacactgtcgctttatccgct

SEQ ID NO: 192292 - DNA, 25 bp, Saccharomyces pastorianus
actgttgctaataatgtccctggaa

SEQ ID NO: 192293 - DNA, 25 bp, Saccharomyces pastorianus
atgtccctggaatgtacactgtcgc

SEQ ID NO: 192294 - DNA, 25 bp, Saccharomyces pastorianus
aattctgctgtgttttgttggctct

SEQ ID NO: 192295 - DNA, 25 bp, Saccharomyces pastorianus
cggaagttgggcgttcatcatctat

SEQ ID NO: 192296 - DNA, 25 bp, Saccharomyces pastorianus
tacggcggtgacattgggttcgagt

SEQ ID NO: 192297 - DNA, 25 bp, Saccharomyces pastorianus
gcatctacctatcggtatcgcaggt

SEQ ID NO: 192298 - DNA, 25 bp, Saccharomyces pastorianus
tgacccgtaatattttatcccgctt

SEQ ID NO: 192299 - DNA, 25 bp, Saccharomyces pastorianus
tcgaatagctgacccgtaatatttt

SEQ ID NO: 192300 - DNA, 25 bp, Saccharomyces pastorianus
tcccgctttaagagttcaacgctaa

SEQ ID NO: 192301 - DNA, 25 bp, Saccharomyces pastorianus
tattttatcccgctttaagagttca

SEQ ID NO: 192302 - DNA, 25 bp, Saccharomyces pastorianus
gctaaccattatgctacaggaacct

SEQ ID NO: 192303 - DNA, 25 bp, Saccharomyces pastorianus
tttttctcagtctgacgctgttact

SEQ ID NO: 192304 - DNA, 25 bp, Saccharomyces pastorianus
gagttcaacgctaaaaaatgatatc

SEQ ID NO: 192305 - DNA, 25 bp, Saccharomyces pastorianus
aatgatatctagctaaccattatgc

SEQ ID NO: 192306 - DNA, 25 bp, Saccharomyces pastorianus
gctgacccgtaatattttatcccgc

SEQ ID NO: 192307 - DNA, 25 bp, Saccharomyces pastorianus
ttatcccgctttaagagttcaacgc

SEQ ID NO: 192308 - DNA, 25 bp, Saccharomyces pastorianus
atagctgacccgtaatattttatcc

SEQ ID NO: 192309 - DNA, 25 bp, Saccharomyces pastorianus
atctaagttacctgatacaagaact

SEQ ID NO: 192310 - DNA, 25 bp, Saccharomyces pastorianus
aaataatctaagttacctgatacaa

SEQ ID NO: 192311 - DNA, 25 bp, Saccharomyces pastorianus
ttattaaataatctaagttacctga

SEQ ID NO: 192312 - DNA, 25 bp, Saccharomyces pastorianus
taatctaagttacctgatacaagaa

SEQ ID NO: 192313 - DNA, 25 bp, Saccharomyces pastorianus
tattaaataatctaagttacctgat

SEQ ID NO: 192314 - DNA, 25 bp, Saccharomyces pastorianus
ataatctaagttacctgatacaaga

SEQ ID NO: 192315 - DNA, 25 bp, Saccharomyces pastorianus
aataatctaagttacctgatacaag

SEQ ID NO: 192316 - DNA, 25 bp, Saccharomyces pastorianus
ttaaataatctaagttacctgatac

SEQ ID NO: 192317 - DNA, 25 bp, Saccharomyces pastorianus
attaaataatctaagttacctgata

SEQ ID NO: 192318 - DNA, 25 bp, Saccharomyces pastorianus
taaataatctaagttacctgataca

SEQ ID NO: 192319 - DNA, 25 bp, Saccharomyces pastorianus
aatctaagttacctgatacaagaac

SEQ ID NO: 192320 - DNA, 25 bp, Saccharomyces pastorianus
cagaactggcagaatgacgaaggtg

SEQ ID NO: 192321 - DNA, 25 bp, Saccharomyces pastorianus
gagacgcagtcaagagttcgccacc

SEQ ID NO: 192322 - DNA, 25 bp, Saccharomyces pastorianus
atgctcatcgatcaaatcgtggcag

SEQ ID NO: 192323 - DNA, 25 bp, Saccharomyces pastorianus
ggcattcaagtctgagatatatttt

SEQ ID NO: 192324 - DNA, 25 bp, Saccharomyces pastorianus
gtctgagatatattttaacacttac

SEQ ID NO: 192325 - DNA, 25 bp, Saccharomyces pastorianus
ggtacctgatataagtggcaacgct

SEQ ID NO: 192326 - DNA, 25 bp, Saccharomyces pastorianus
aacgcttcggccctatcgttacaga

SEQ ID NO: 192327 - DNA, 25 bp, Saccharomyces pastorianus
ggccctatcgttacagagacgcagt

SEQ ID NO: 192328 - DNA, 25 bp, Saccharomyces pastorianus
aaacggtgagccacttgattacgat

SEQ ID NO: 192329 - DNA, 25 bp, Saccharomyces pastorianus
ggacacgaaaaacggtgagccactt

SEQ ID NO: 192330 - DNA, 25 bp, Saccharomyces pastorianus
agggattggaaatactgctttgctg

SEQ ID NO: 192331 - DNA, 25 bp, Saccharomyces pastorianus
tttttcaccatctactatccactca

SEQ ID NO: 192332 - DNA, 25 bp, Saccharomyces pastorianus
actttttcaccatctactatccact

SEQ ID NO: 192333 - DNA, 25 bp, Saccharomyces pastorianus
taccactttttcaccatctactatc

SEQ ID NO: 192334 - DNA, 25 bp, Saccharomyces pastorianus
ttttcaccatctactatccactcaa

SEQ ID NO: 192335 - DNA, 25 bp, Saccharomyces pastorianus
ccactttttcaccatctactatcca

SEQ ID NO: 192336 - DNA, 25 bp, Saccharomyces pastorianus
catctactatccactcaatttatat

SEQ ID NO: 192337 - DNA, 25 bp, Saccharomyces pastorianus
tcaccatctactatccactcaattt

SEQ ID NO: 192338 - DNA, 25 bp, Saccharomyces pastorianus
ataccactttttcaccatctactat

SEQ ID NO: 192339 - DNA, 25 bp, Saccharomyces pastorianus
ttcaccatctactatccactcaatt

SEQ ID NO: 192340 - DNA, 25 bp, Saccharomyces pastorianus
tttcaccatctactatccactcaat

SEQ ID NO: 192341 - DNA, 25 bp, Saccharomyces pastorianus
accactttttcaccatctactatcc

SEQ ID NO: 192342 - DNA, 25 bp, Saccharomyces pastorianus
gtagtcgcattggtactggcattag

SEQ ID NO: 192343 - DNA, 25 bp, Saccharomyces pastorianus
tagtcgcattggtactggcattagc

SEQ ID NO: 192344 - DNA, 25 bp, Saccharomyces pastorianus
ctggagttggtagtcgcattggtac

SEQ ID NO: 192345 - DNA, 25 bp, Saccharomyces pastorianus
agtcgcattggtactggcattagca

SEQ ID NO: 192346 - DNA, 25 bp, Saccharomyces pastorianus
tgcaatactttctgcacctgtcact

SEQ ID NO: 192347 - DNA, 25 bp, Saccharomyces pastorianus
tggagttggtagtcgcattggtact

SEQ ID NO: 192348 - DNA, 25 bp, Saccharomyces pastorianus
catgaatgcacgtgtcgctgtcctc

SEQ ID NO: 192349 - DNA, 25 bp, Saccharomyces pastorianus
gttggtagtcgcattggtactggca

SEQ ID NO: 192350 - DNA, 25 bp, Saccharomyces pastorianus
ggtagtcgcattggtactggcatta

SEQ ID NO: 192351 - DNA, 25 bp, Saccharomyces pastorianus
ttggtagtcgcattggtactggcat

SEQ ID NO: 192352 - DNA, 25 bp, Saccharomyces pastorianus
tagcactaccatgaatgcacgtgtc

SEQ ID NO: 192353 - DNA, 25 bp, Saccharomyces pastorianus
aaccaaccatattacaagtcacaaa

SEQ ID NO: 192354 - DNA, 25 bp, Saccharomyces pastorianus
gtaaccaaccatattacaagtcaca

SEQ ID NO: 192355 - DNA, 25 bp, Saccharomyces pastorianus
tggtaaccaaccatattacaagtca

SEQ ID NO: 192356 - DNA, 25 bp, Saccharomyces pastorianus
atggtaaccaaccatattacaagtc

SEQ ID NO: 192357 - DNA, 25 bp, Saccharomyces pastorianus
tatggtaaccaaccatattacaagt

SEQ ID NO: 192358 - DNA, 25 bp, Saccharomyces pastorianus
accaaccatattacaagtcacaaat

SEQ ID NO: 192359 - DNA, 25 bp, Saccharomyces pastorianus
ggtaaccaaccatattacaagtcac

SEQ ID NO: 192360 - DNA, 25 bp, Saccharomyces pastorianus
taaccaaccatattacaagtcacaa

SEQ ID NO: 192361 - DNA, 25 bp, Saccharomyces pastorianus
gtccaagttgaacgatgccgtcgaa

SEQ ID NO: 192362 - DNA, 25 bp, Saccharomyces pastorianus
aacgatgccgtcgaatatgtttccg

SEQ ID NO: 192363 - DNA, 25 bp, Saccharomyces pastorianus
tagagattacatgggagccgccaag

SEQ ID NO: 192364 - DNA, 25 bp, Saccharomyces pastorianus
ttggcagaccaagctagagattaca

SEQ ID NO: 192365 - DNA, 25 bp, Saccharomyces pastorianus
aaaggattcggtgaaaaagcttctg

SEQ ID NO: 192366 - DNA, 25 bp, Saccharomyces pastorianus
gtgtccacgactctgccgaaaaagg

SEQ ID NO: 192367 - DNA, 25 bp, Saccharomyces pastorianus
aaggcaaggataacgctgaaggtca

SEQ ID NO: 192368 - DNA, 25 bp, Saccharomyces pastorianus
gtcaaggtgaatctttggcagacca

SEQ ID NO: 192369 - DNA, 25 bp, Saccharomyces pastorianus
gacaaggtcgctggtaaggttcaac

SEQ ID NO: 192370 - DNA, 25 bp, Saccharomyces pastorianus
cgtcgaatatgtttccggtcgtgtc

SEQ ID NO: 192371 - DNA, 25 bp, Saccharomyces pastorianus
gtaaggttcaaccagaagacaacaa

SEQ ID NO: 192372 - DNA, 25 bp, Saccharomyces pastorianus
agatatactactaaagactcccttt

SEQ ID NO: 192373 - DNA, 25 bp, Saccharomyces pastorianus
ttaaccagttacaggtcaaaagact

SEQ ID NO: 192374 - DNA, 25 bp, Saccharomyces pastorianus
caaagggcatacatatcaatttttt

SEQ ID NO: 192375 - DNA, 25 bp, Saccharomyces pastorianus
aggctccaccagtcatttcgaaatt

SEQ ID NO: 192376 - DNA, 25 bp, Saccharomyces pastorianus
gactaaacttactgcaaaaccaatt

SEQ ID NO: 192377 - DNA, 25 bp, Saccharomyces pastorianus
cacttctttccaccccaaagataat

SEQ ID NO: 192378 - DNA, 25 bp, Saccharomyces pastorianus
tatattcgagtcaggctccaccagt

SEQ ID NO: 192379 - DNA, 25 bp, Saccharomyces pastorianus
ttttttcacctgtcactaggataac

SEQ ID NO: 192380 - DNA, 25 bp, Saccharomyces pastorianus
ttgcttctgttttcacttctttcca

SEQ ID NO: 192381 - DNA, 25 bp, Saccharomyces pastorianus
agactccctttgctctatattcgag

SEQ ID NO: 192382 - DNA, 25 bp, Saccharomyces pastorianus
accaatttgcttctgttttcacttc

SEQ ID NO: 192383 - DNA, 25 bp, Saccharomyces pastorianus
gtattcccgccgaccaagttaccag

SEQ ID NO: 192384 - DNA, 25 bp, Saccharomyces pastorianus
gccgaccaagttaccagagttatca

SEQ ID NO: 192385 - DNA, 25 bp, Saccharomyces pastorianus
gttgactggtattcccgccgaccaa

SEQ ID NO: 192386 - DNA, 25 bp, Saccharomyces pastorianus
ccgccgaccaagttaccagagttat

SEQ ID NO: 192387 - DNA, 25 bp, Saccharomyces pastorianus
attcccgccgaccaagttaccagag

SEQ ID NO: 192388 - DNA, 25 bp, Saccharomyces pastorianus
tcccgccgaccaagttaccagagtt

SEQ ID NO: 192389 - DNA, 25 bp, Saccharomyces pastorianus
ttcccgccgaccaagttaccagagt

SEQ ID NO: 192390 - DNA, 25 bp, Saccharomyces pastorianus
ccgaccaagttaccagagttatcac

SEQ ID NO: 192391 - DNA, 25 bp, Saccharomyces pastorianus
cgaccaagttaccagagttatcact

SEQ ID NO: 192392 - DNA, 25 bp, Saccharomyces pastorianus
ttgactggtattcccgccgaccaag

SEQ ID NO: 192393 - DNA, 25 bp, Saccharomyces pastorianus
cgccgaccaagttaccagagttatc

SEQ ID NO: 192394 - DNA, 25 bp, Saccharomyces pastorianus
atatgggtgtgaccgcttgcaacaa

SEQ ID NO: 192395 - DNA, 25 bp, Saccharomyces pastorianus
gatttgcaccgtgaaatgagtgatt

SEQ ID NO: 192396 - DNA, 25 bp, Saccharomyces pastorianus
gcttgcaacaagaatttaccgtaca

SEQ ID NO: 192397 - DNA, 25 bp, Saccharomyces pastorianus
gcaccgtgaaatgagtgattggttt

SEQ ID NO: 192398 - DNA, 25 bp, Saccharomyces pastorianus
tgggtgtgaccgcttgcaacaagaa

SEQ ID NO: 192399 - DNA, 25 bp, Saccharomyces pastorianus
gaatttaccgtacatgaagaactgc

SEQ ID NO: 192400 - DNA, 25 bp, Saccharomyces pastorianus
tatatccgtattggacatatgggtg

SEQ ID NO: 192401 - DNA, 25 bp, Saccharomyces pastorianus
tattggacatatgggtgtgaccgct

SEQ ID NO: 192402 - DNA, 25 bp, Saccharomyces pastorianus
gtgtgaccgcttgcaacaagaattt

SEQ ID NO: 192403 - DNA, 25 bp, Saccharomyces pastorianus
tgcaacaagaatttaccgtacatga

SEQ ID NO: 192404 - DNA, 25 bp, Saccharomyces pastorianus
gacatatgggtgtgaccgcttgcaa

SEQ ID NO: 192405 - DNA, 25 bp, Saccharomyces pastorianus
gcactcgtcgtctgatacgttcaca

SEQ ID NO: 192406 - DNA, 25 bp, Saccharomyces pastorianus
aaaatgtaccagagtcgacgacgct

SEQ ID NO: 192407 - DNA, 25 bp, Saccharomyces pastorianus
gacccactctgcgacgatatagcgg

SEQ ID NO: 192408 - DNA, 25 bp, Saccharomyces pastorianus
tgaacaagaacactagccccagctt

SEQ ID NO: 192409 - DNA, 25 bp, Saccharomyces pastorianus
actgtacaatggagcctgcgacttt

SEQ ID NO: 192410 - DNA, 25 bp, Saccharomyces pastorianus
acaatttgtttgatgcggtggcctc

SEQ ID NO: 192411 - DNA, 25 bp, Saccharomyces pastorianus
aagagtatgcgcgattccgcgtcgg

SEQ ID NO: 192412 - DNA, 25 bp, Saccharomyces pastorianus
gagccattcttttcttattactaag

SEQ ID NO: 192413 - DNA, 25 bp, Saccharomyces pastorianus
gacggcttgcttgtactgtccgaag

SEQ ID NO: 192414 - DNA, 25 bp, Saccharomyces pastorianus
gggaaacagtctaccctttgacaat

SEQ ID NO: 192415 - DNA, 25 bp, Saccharomyces pastorianus
gtccgaagcgcagtcaggtttgaat

SEQ ID NO: 192416 - DNA, 25 bp, Saccharomyces pastorianus
gaagcttgcttaccaacaaacaaaa

SEQ ID NO: 192417 - DNA, 25 bp, Saccharomyces pastorianus
tctccatatactatagtccgccttg

SEQ ID NO: 192418 - DNA, 25 bp, Saccharomyces pastorianus
tcttggtcttcgtggcgctagctac

SEQ ID NO: 192419 - DNA, 25 bp, Saccharomyces pastorianus
tagccagtacagaagcttgcttacc

SEQ ID NO: 192420 - DNA, 25 bp, Saccharomyces pastorianus
gctactacaaccttagccagtacag

SEQ ID NO: 192421 - DNA, 25 bp, Saccharomyces pastorianus
gtggcgctagctactacaaccttag

SEQ ID NO: 192422 - DNA, 25 bp, Saccharomyces pastorianus
atggatatgatccttgcggacctct

SEQ ID NO: 192423 - DNA, 25 bp, Saccharomyces pastorianus
gtgacccaaatactgcctattggag

SEQ ID NO: 192424 - DNA, 25 bp, Saccharomyces pastorianus
tatagtccgccttgtgagagcactc

SEQ ID NO: 192425 - DNA, 25 bp, Saccharomyces pastorianus
cttgcggacctctttatgaaactaa

SEQ ID NO: 192426 - DNA, 25 bp, Saccharomyces pastorianus
agagcactcctacctgtgtgactta

SEQ ID NO: 192427 - DNA, 25 bp, Saccharomyces pastorianus
gagggaacttcatacggtgccactt

SEQ ID NO: 192428 - DNA, 25 bp, Saccharomyces pastorianus
atgcttctttgatgctctagctacc

SEQ ID NO: 192429 - DNA, 25 bp, Saccharomyces pastorianus
ttgtcttctctcttaagcattgtga

SEQ ID NO: 192430 - DNA, 25 bp, Saccharomyces pastorianus
ttcctctttctaatccgcttgaatc

SEQ ID NO: 192431 - DNA, 25 bp, Saccharomyces pastorianus
accgactctgctaatgtaacctgta

SEQ ID NO: 192432 - DNA, 25 bp, Saccharomyces pastorianus
aagtgtcagtgtgcgcttatcacgc

SEQ ID NO: 192433 - DNA, 25 bp, Saccharomyces pastorianus
gactatctctcgacagcttcttgga

SEQ ID NO: 192434 - DNA, 25 bp, Saccharomyces pastorianus
agaaccatggtcttacggctatgta

SEQ ID NO: 192435 - DNA, 25 bp, Saccharomyces pastorianus
tactgtaccgggaaaatgcttcttt

SEQ ID NO: 192436 - DNA, 25 bp, Saccharomyces pastorianus
agacatatctttttcacggcattgg

SEQ ID NO: 192437 - DNA, 25 bp, Saccharomyces pastorianus
gcggtatgcgaatcagtttcctttc

SEQ ID NO: 192438 - DNA, 25 bp, Saccharomyces pastorianus
aagctgcttatgatggtgccgaaaa

SEQ ID NO: 192439 - DNA, 25 bp, Saccharomyces pastorianus
aggactctgatcgatgctctgcaac

SEQ ID NO: 192440 - DNA, 25 bp, Saccharomyces pastorianus
gcaaccttttgtcgaagcgctgaaa

SEQ ID NO: 192441 - DNA, 25 bp, Saccharomyces pastorianus
gaactactcttgtgtccggtggtga

SEQ ID NO: 192442 - DNA, 25 bp, Saccharomyces pastorianus
taagtatacgagagcccgtcctggt

SEQ ID NO: 192443 - DNA, 25 bp, Saccharomyces pastorianus
cgaggatgctgctcttggtatcgaa

SEQ ID NO: 192444 - DNA, 25 bp, Saccharomyces pastorianus
ggagcagttggtcttgctgcactac

SEQ ID NO: 192445 - DNA, 25 bp, Saccharomyces pastorianus
tggtctgtactctatctatctttct

SEQ ID NO: 192446 - DNA, 25 bp, Saccharomyces pastorianus
ttgggcgtgcttcttacgtggctaa

SEQ ID NO: 192447 - DNA, 25 bp, Saccharomyces pastorianus
taaaaaccatacgttgcgcctcgag

SEQ ID NO: 192448 - DNA, 25 bp, Saccharomyces pastorianus
tatctttctgctctcgcacaaggag

SEQ ID NO: 192449 - DNA, 25 bp, Saccharomyces pastorianus
agtcgctgcaattggtatggccctt

SEQ ID NO: 192450 - DNA, 25 bp, Saccharomyces pastorianus
gaaatgccttctttgacgaattcat

SEQ ID NO: 192451 - DNA, 25 bp, Saccharomyces pastorianus
ggttatttttggagctctatcacag

SEQ ID NO: 192452 - DNA, 25 bp, Saccharomyces pastorianus
accggtgcgtgtttgtttactgatc

SEQ ID NO: 192453 - DNA, 25 bp, Saccharomyces pastorianus
ggagcctctatacttgtgggttgtt

SEQ ID NO: 192454 - DNA, 25 bp, Saccharomyces pastorianus
aagagatctcggtcctcgcatattt

SEQ ID NO: 192455 - DNA, 25 bp, Saccharomyces pastorianus
tgattggctatggtccacatgcttt

SEQ ID NO: 192456 - DNA, 25 bp, Saccharomyces pastorianus
aattgccggcggtattgctggagca

SEQ ID NO: 192457 - DNA, 25 bp, Saccharomyces pastorianus
tttacatgcggagttccaccagaat

SEQ ID NO: 192458 - DNA, 25 bp, Saccharomyces pastorianus
acatgcttttcatctcacacattgg

SEQ ID NO: 192459 - DNA, 25 bp, Saccharomyces pastorianus
gtaatgctccacctggcaatggtat

SEQ ID NO: 192460 - DNA, 25 bp, Saccharomyces pastorianus
agctgcaaatgcgtactcttatatc

SEQ ID NO: 192461 - DNA, 25 bp, Saccharomyces pastorianus
tagtctggccgctaacatttttcta

SEQ ID NO: 192462 - DNA, 25 bp, Saccharomyces pastorianus
aatctttctggtgttggcgtcttta

SEQ ID NO: 192463 - DNA, 25 bp, Saccharomyces pastorianus
atttcgtaccttttgatgcgggcaa

SEQ ID NO: 192464 - DNA, 25 bp, Saccharomyces pastorianus
gcttatatccttctgcctgttggaa

SEQ ID NO: 192465 - DNA, 25 bp, Saccharomyces pastorianus
acatttttctagcactcatccaagg

SEQ ID NO: 192466 - DNA, 25 bp, Saccharomyces pastorianus
aattctggcttggaccgatcgaaga

SEQ ID NO: 192467 - DNA, 25 bp, Saccharomyces pastorianus
tgaagcgctattttatccgtggacg

SEQ ID NO: 192468 - DNA, 25 bp, Saccharomyces pastorianus
gagtagcttagcatcttcggaaacg

SEQ ID NO: 192469 - DNA, 25 bp, Saccharomyces pastorianus
aacgccttgggcctaatatcattga

SEQ ID NO: 192470 - DNA, 25 bp, Saccharomyces pastorianus
gggagcagaaccttgacgcatttag

SEQ ID NO: 192471 - DNA, 25 bp, Saccharomyces pastorianus
taatcgccaccaagtttaccactga

SEQ ID NO: 192472 - DNA, 25 bp, Saccharomyces pastorianus
agcttttgagttgctcgatgctttt

SEQ ID NO: 192473 - DNA, 25 bp, Saccharomyces pastorianus
ggaatgtcaattggcgacgcttggt

SEQ ID NO: 192474 - DNA, 25 bp, Saccharomyces pastorianus
gagtttcccctctcattttgggagg

SEQ ID NO: 192475 - DNA, 25 bp, Saccharomyces pastorianus
aagcgcaaactactgtggcaatcac

SEQ ID NO: 192476 - DNA, 25 bp, Saccharomyces pastorianus
gacgcttggtctgaaatcctaggat

SEQ ID NO: 192477 - DNA, 25 bp, Saccharomyces pastorianus
ctgctcctgaaccatctacagagtt

SEQ ID NO: 192478 - DNA, 25 bp, Saccharomyces pastorianus
agtgctggtattagagtttcccctc

SEQ ID NO: 192479 - DNA, 25 bp, Saccharomyces pastorianus
ttctagtgcagcaggcaaggtcctc

SEQ ID NO: 192480 - DNA, 25 bp, Saccharomyces pastorianus
gttaggacgtctcagagttctttct

SEQ ID NO: 192481 - DNA, 25 bp, Saccharomyces pastorianus
attacgcgaccagattgtaatcgcc

SEQ ID NO: 192482 - DNA, 25 bp, Saccharomyces pastorianus
ttttgatgttggttttcctactaat

SEQ ID NO: 192483 - DNA, 25 bp, Saccharomyces pastorianus
tgatgttggttttcctactaatttt

SEQ ID NO: 192484 - DNA, 25 bp, Saccharomyces pastorianus
atccggctgttaccaagaaggcttc

SEQ ID NO: 192485 - DNA, 25 bp, Saccharomyces pastorianus
tttcctactaattttatcggtgatg

SEQ ID NO: 192486 - DNA, 25 bp, Saccharomyces pastorianus
aattttatcggtgatgatccggctg

SEQ ID NO: 192487 - DNA, 25 bp, Saccharomyces pastorianus
tatcggtgatgatccggctgttacc

SEQ ID NO: 192488 - DNA, 25 bp, Saccharomyces pastorianus
atcggtgatgatccggctgttacca

SEQ ID NO: 192489 - DNA, 25 bp, Saccharomyces pastorianus
gtgatgatccggctgttaccaagaa

SEQ ID NO: 192490 - DNA, 25 bp, Saccharomyces pastorianus
gatccggctgttaccaagaaggctt

SEQ ID NO: 192491 - DNA, 25 bp, Saccharomyces pastorianus
atgatccggctgttaccaagaaggc

SEQ ID NO: 192492 - DNA, 25 bp, Saccharomyces pastorianus
tgatgatccggctgttaccaagaag

SEQ ID NO: 192493 - DNA, 25 bp, Saccharomyces pastorianus
ggatttgactgggactggctacatt

SEQ ID NO: 192494 - DNA, 25 bp, Saccharomyces pastorianus
agtaactgaggccatcattcgtcac

SEQ ID NO: 192495 - DNA, 25 bp, Saccharomyces pastorianus
gaaactgctaggcttgttcgggaat

SEQ ID NO: 192496 - DNA, 25 bp, Saccharomyces pastorianus
gttgttccgcctccaaacagtgaaa

SEQ ID NO: 192497 - DNA, 25 bp, Saccharomyces pastorianus
gttctaaaccactctttgcgtgttt

SEQ ID NO: 192498 - DNA, 25 bp, Saccharomyces pastorianus
gggctcattctgcagattgctacta

SEQ ID NO: 192499 - DNA, 25 bp, Saccharomyces pastorianus
aagactgcactggttatcatgtttt

SEQ ID NO: 192500 - DNA, 25 bp, Saccharomyces pastorianus
tggtggcatactttcaagggagctt

SEQ ID NO: 192501 - DNA, 25 bp, Saccharomyces pastorianus
ttgctactacgcttgacaatgtcgg

SEQ ID NO: 192502 - DNA, 25 bp, Saccharomyces pastorianus
gagaccaatttccagcatgggactt

SEQ ID NO: 192503 - DNA, 25 bp, Saccharomyces pastorianus
gtcacctgcttacttcatgatattg

SEQ ID NO: 192504 - DNA, 25 bp, Saccharomyces pastorianus
aatgcacacatacttaccctgccaa

SEQ ID NO: 192505 - DNA, 25 bp, Saccharomyces pastorianus
atatttatatcttattccgcggccc

SEQ ID NO: 192506 - DNA, 25 bp, Saccharomyces pastorianus
ctgtcatactcaccatcacttgtat

SEQ ID NO: 192507 - DNA, 25 bp, Saccharomyces pastorianus
atctgtcatactcaccatcacttgt

SEQ ID NO: 192508 - DNA, 25 bp, Saccharomyces pastorianus
cacttcatgagtacaaatgcaccca

SEQ ID NO: 192509 - DNA, 25 bp, Saccharomyces pastorianus
gatcgtaaacaatgcacacatactt

SEQ ID NO: 192510 - DNA, 25 bp, Saccharomyces pastorianus
aacaatgcacacatacttaccctgc

SEQ ID NO: 192511 - DNA, 25 bp, Saccharomyces pastorianus
tgcacacatacttaccctgccaata

SEQ ID NO: 192512 - DNA, 25 bp, Saccharomyces pastorianus
catctctcacttcatgagtacaaat

SEQ ID NO: 192513 - DNA, 25 bp, Saccharomyces pastorianus
ttatatcttattccgcggccccaaa

SEQ ID NO: 192514 - DNA, 25 bp, Saccharomyces pastorianus
atttatatcttattccgcggcccca

SEQ ID NO: 192515 - DNA, 25 bp, Saccharomyces pastorianus
aatttggcaccccacatgtttttgt

SEQ ID NO: 192516 - DNA, 25 bp, Saccharomyces pastorianus
ggcaccccacatgtttttgttacta

SEQ ID NO: 192517 - DNA, 25 bp, Saccharomyces pastorianus
ctgactttgtttctggcgcacctat

SEQ ID NO: 192518 - DNA, 25 bp, Saccharomyces pastorianus
tggcaccccacatgtttttgttact

SEQ ID NO: 192519 - DNA, 25 bp, Saccharomyces pastorianus
tttcactgactttgtttctggcgca

SEQ ID NO: 192520 - DNA, 25 bp, Saccharomyces pastorianus
ctttcactgactttgtttctggcgc

SEQ ID NO: 192521 - DNA, 25 bp, Saccharomyces pastorianus
ttcactgactttgtttctggcgcac

SEQ ID NO: 192522 - DNA, 25 bp, Saccharomyces pastorianus
gtacaatttggcaccccacatgttt

SEQ ID NO: 192523 - DNA, 25 bp, Saccharomyces pastorianus
ttggcaccccacatgtttttgttac

SEQ ID NO: 192524 - DNA, 25 bp, Saccharomyces pastorianus
tttggcaccccacatgtttttgtta

SEQ ID NO: 192525 - DNA, 25 bp, Saccharomyces pastorianus
actgactttgtttctggcgcaccta

SEQ ID NO: 192526 - DNA, 25 bp, Saccharomyces pastorianus
tgctcttggagaaagtattttaggg

SEQ ID NO: 192527 - DNA, 25 bp, Saccharomyces pastorianus
gcctgctcttggagaaagtatttta

SEQ ID NO: 192528 - DNA, 25 bp, Saccharomyces pastorianus
ctgctcttggagaaagtattttagg

SEQ ID NO: 192529 - DNA, 25 bp, Saccharomyces pastorianus
tggagaaagtattttagggtggtat

SEQ ID NO: 192530 - DNA, 25 bp, Saccharomyces pastorianus
gaaagtattttagggtggtatggat

SEQ ID NO: 192531 - DNA, 25 bp, Saccharomyces pastorianus
tcttggagaaagtattttagggtgg

SEQ ID NO: 192532 - DNA, 25 bp, Saccharomyces pastorianus
gctcttggagaaagtattttagggt

SEQ ID NO: 192533 - DNA, 25 bp, Saccharomyces pastorianus
ctcttggagaaagtattttagggtg

SEQ ID NO: 192534 - DNA, 25 bp, Saccharomyces pastorianus
ggcctgctcttggagaaagtatttt

SEQ ID NO: 192535 - DNA, 25 bp, Saccharomyces pastorianus
cctgctcttggagaaagtattttag

SEQ ID NO: 192536 - DNA, 25 bp, Saccharomyces pastorianus
cgcattagtactggcgttagtactg

SEQ ID NO: 192537 - DNA, 25 bp, Saccharomyces pastorianus
tagcagtggtaatcgcattagtact

SEQ ID NO: 192538 - DNA, 25 bp, Saccharomyces pastorianus
agtactagcattggtagtcgcatta

SEQ ID NO: 192539 - DNA, 25 bp, Saccharomyces pastorianus
gtggtaatcgcattagtactggcgt

SEQ ID NO: 192540 - DNA, 25 bp, Saccharomyces pastorianus
gtactggcattggtagtcgcattag

SEQ ID NO: 192541 - DNA, 25 bp, Saccharomyces pastorianus
attggtactggcattggtagtcgca

SEQ ID NO: 192542 - DNA, 25 bp, Saccharomyces pastorianus
attggtactggcattggtactggca

SEQ ID NO: 192543 - DNA, 25 bp, Saccharomyces pastorianus
aatcgcattagtactggcgttagta

SEQ ID NO: 192544 - DNA, 25 bp, Saccharomyces pastorianus
gtcgcattagtactagcattggtag

SEQ ID NO: 192545 - DNA, 25 bp, Saccharomyces pastorianus
ggtactggcattggtagtcgcattg

SEQ ID NO: 192546 - DNA, 25 bp, Saccharomyces pastorianus
ggtagtcgcattagtactagcattg

SEQ ID NO: 192547 - DNA, 25 bp, Saccharomyces pastorianus
cagaaagtacaagcccgcctacaaa

SEQ ID NO: 192548 - DNA, 25 bp, Saccharomyces pastorianus
gtacaagcccgcctacaaaaaacag

SEQ ID NO: 192549 - DNA, 25 bp, Saccharomyces pastorianus
aaaacaggcacatcgtgtgaagagt

SEQ ID NO: 192550 - DNA, 25 bp, Saccharomyces pastorianus
gcccgcctacaaaaaacaggcacat

SEQ ID NO: 192551 - DNA, 25 bp, Saccharomyces pastorianus
ccagaaagtacaagcccgcctacaa

SEQ ID NO: 192552 - DNA, 25 bp, Saccharomyces pastorianus
cctacaaaaaacaggcacatcgtgt

SEQ ID NO: 192553 - DNA, 25 bp, Saccharomyces pastorianus
aaaaaacaggcacatcgtgtgaaga

SEQ ID NO: 192554 - DNA, 25 bp, Saccharomyces pastorianus
atgctccccagaaagtacaagcccg

SEQ ID NO: 192555 - DNA, 25 bp, Saccharomyces pastorianus
acaaaaaacaggcacatcgtgtgaa

SEQ ID NO: 192556 - DNA, 25 bp, Saccharomyces pastorianus
caagcccgcctacaaaaaacaggca

SEQ ID NO: 192557 - DNA, 25 bp, Saccharomyces pastorianus
tacaagcccgcctacaaaaaacagg

SEQ ID NO: 192558 - DNA, 25 bp, Saccharomyces pastorianus
tgattactggaaggctcccggtgat

SEQ ID NO: 192559 - DNA, 25 bp, Saccharomyces pastorianus
ctcccggtgattacggtatcgaaca

SEQ ID NO: 192560 - DNA, 25 bp, Saccharomyces pastorianus
attactggaaggctcccggtgatta

SEQ ID NO: 192561 - DNA, 25 bp, Saccharomyces pastorianus
atgattactggaaggctcccggtga

SEQ ID NO: 192562 - DNA, 25 bp, Saccharomyces pastorianus
gctcccggtgattacggtatcgaac

SEQ ID NO: 192563 - DNA, 25 bp, Saccharomyces pastorianus
caatgattactggaaggctcccggt

SEQ ID NO: 192564 - DNA, 25 bp, Saccharomyces pastorianus
aatgattactggaaggctcccggtg

SEQ ID NO: 192565 - DNA, 25 bp, Saccharomyces pastorianus
tcccggtgattacggtatcgaacaa

SEQ ID NO: 192566 - DNA, 25 bp, Saccharomyces pastorianus
tacaatgattactggaaggctcccg

SEQ ID NO: 192567 - DNA, 25 bp, Saccharomyces pastorianus
ttacaatgattactggaaggctccc

SEQ ID NO: 192568 - DNA, 25 bp, Saccharomyces pastorianus
acaatgattactggaaggctcccgg

SEQ ID NO: 192569 - DNA, 25 bp, Saccharomyces pastorianus
ctttatgtgtgcatctattttgtca

SEQ ID NO: 192570 - DNA, 25 bp, Saccharomyces pastorianus
atgagtttctgcacctttatgtgtg

SEQ ID NO: 192571 - DNA, 25 bp, Saccharomyces pastorianus
gtctgtcgtcccaagattgagcgta

SEQ ID NO: 192572 - DNA, 25 bp, Saccharomyces pastorianus
tcccagaacattaggcctcgaattt

SEQ ID NO: 192573 - DNA, 25 bp, Saccharomyces pastorianus
acttttcccagaacattaggcctcg

SEQ ID NO: 192574 - DNA, 25 bp, Saccharomyces pastorianus
attaggctgtctgtcgtcccaagat

SEQ ID NO: 192575 - DNA, 25 bp, Saccharomyces pastorianus
tattttgtcattaggctgtctgtcg

SEQ ID NO: 192576 - DNA, 25 bp, Saccharomyces pastorianus
gtcgtcccaagattgagcgtaaaat

SEQ ID NO: 192577 - DNA, 25 bp, Saccharomyces pastorianus
aggcctcgaatttatttgatccatg

SEQ ID NO: 192578 - DNA, 25 bp, Saccharomyces pastorianus
tttgatccatgagtttctgcacctt

SEQ ID NO: 192579 - DNA, 25 bp, Saccharomyces pastorianus
atgccagatttttccaattccaatt

SEQ ID NO: 192580 - DNA, 25 bp, Saccharomyces pastorianus
aaatgcaatattgaaaatgcctcta

SEQ ID NO: 192581 - DNA, 25 bp, Saccharomyces pastorianus
atcgtgaaaagggtcctgcgttatt

SEQ ID NO: 192582 - DNA, 25 bp, Saccharomyces pastorianus
aacaatcgtgaaaagggtcctgcgt

SEQ ID NO: 192583 - DNA, 25 bp, Saccharomyces pastorianus
atggcacagagacaatcaggaatac

SEQ ID NO: 192584 - DNA, 25 bp, Saccharomyces pastorianus
gcaatggcacagagacaatcaggaa

SEQ ID NO: 192585 - DNA, 25 bp, Saccharomyces pastorianus
gatcagtatgcaatggcacagagac

SEQ ID NO: 192586 - DNA, 25 bp, Saccharomyces pastorianus
attttcattatacatcacttcgcaa

SEQ ID NO: 192587 - DNA, 25 bp, Saccharomyces pastorianus
taccacattttcattatacatcact

SEQ ID NO: 192588 - DNA, 25 bp, Saccharomyces pastorianus
gggtcctgcgttattaaaacatttg

SEQ ID NO: 192589 - DNA, 25 bp, Saccharomyces pastorianus
tatgcaatggcacagagacaatcag

SEQ ID NO: 192590 - DNA, 25 bp, Saccharomyces pastorianus
acatttgatcagtatgcaatggcac

SEQ ID NO: 192591 - DNA, 25 bp, Saccharomyces pastorianus
gcgcactacatgaagctggattatt

SEQ ID NO: 192592 - DNA, 25 bp, Saccharomyces pastorianus
acgtggtgacgtagcaagattggaa

SEQ ID NO: 192593 - DNA, 25 bp, Saccharomyces pastorianus
actgagtgtacctatgccccagaag

SEQ ID NO: 192594 - DNA, 25 bp, Saccharomyces pastorianus
taatgaatatcctacgtggtgacgt

SEQ ID NO: 192595 - DNA, 25 bp, Saccharomyces pastorianus
gcggctctcccatcaagagatcaaa

SEQ ID NO: 192596 - DNA, 25 bp, Saccharomyces pastorianus
attgtcctgtatgcgcactacatga

SEQ ID NO: 192597 - DNA, 25 bp, Saccharomyces pastorianus
ggaaattgtcctgtatgcgcactac

SEQ ID NO: 192598 - DNA, 25 bp, Saccharomyces pastorianus
ttatcacacaaagtagcggctctcc

SEQ ID NO: 192599 - DNA, 25 bp, Saccharomyces pastorianus
ggcagagacagtactaatgaatatc

SEQ ID NO: 192600 - DNA, 25 bp, Saccharomyces pastorianus
caagattggaaaaatcgactgcgat

SEQ ID NO: 192601 - DNA, 25 bp, Saccharomyces pastorianus
atcgactgcgattatcacacaaagt

SEQ ID NO: 192602 - DNA, 25 bp, Saccharomyces pastorianus
aggatgtttctaccgtcttcaaaag

SEQ ID NO: 192603 - DNA, 25 bp, Saccharomyces pastorianus
ggtcttccgcaagttcctatgttaa

SEQ ID NO: 192604 - DNA, 25 bp, Saccharomyces pastorianus
aggcacacaggatgtttctaccgtc

SEQ ID NO: 192605 - DNA, 25 bp, Saccharomyces pastorianus
gatggaaatcggaacgcctccacaa

SEQ ID NO: 192606 - DNA, 25 bp, Saccharomyces pastorianus
gcctattgcaaatcgatgtctgacg

SEQ ID NO: 192607 - DNA, 25 bp, Saccharomyces pastorianus
atcctctctttgttgtcatcattga

SEQ ID NO: 192608 - DNA, 25 bp, Saccharomyces pastorianus
atgcaattgttttccatcctctctt

SEQ ID NO: 192609 - DNA, 25 bp, Saccharomyces pastorianus
gatgtgttcattgaccgttttaggg

SEQ ID NO: 192610 - DNA, 25 bp, Saccharomyces pastorianus
gatactggctcttcagatatgattg

SEQ ID NO: 192611 - DNA, 25 bp, Saccharomyces pastorianus
gaggttcttaacaccacagtgataa

SEQ ID NO: 192612 - DNA, 25 bp, Saccharomyces pastorianus
gttcctatgttaagtttcctgttca

SEQ ID NO: 192613 - DNA, 25 bp, Saccharomyces pastorianus
acaacaaagatggtgctcaatgcga

SEQ ID NO: 192614 - DNA, 25 bp, Saccharomyces pastorianus
gggcacattcattgcagagacgcat

SEQ ID NO: 192615 - DNA, 25 bp, Saccharomyces pastorianus
atgcatgttcggttggttcgcaaat

SEQ ID NO: 192616 - DNA, 25 bp, Saccharomyces pastorianus
tgtggtaaaggccatctgcgattat

SEQ ID NO: 192617 - DNA, 25 bp, Saccharomyces pastorianus
gggttgatggcttctgtaatgacaa

SEQ ID NO: 192618 - DNA, 25 bp, Saccharomyces pastorianus
tggatcgctaccagatactctttct

SEQ ID NO: 192619 - DNA, 25 bp, Saccharomyces pastorianus
gatgaaaatgctgtccacggtgaat

SEQ ID NO: 192620 - DNA, 25 bp, Saccharomyces pastorianus
ggaggaggacgatcaatgcatgttc

SEQ ID NO: 192621 - DNA, 25 bp, Saccharomyces pastorianus
gtgttcaaacacctggatcgctacc

SEQ ID NO: 192622 - DNA, 25 bp, Saccharomyces pastorianus
cgcataagctattttgacgtcaatt

SEQ ID NO: 192623 - DNA, 25 bp, Saccharomyces pastorianus
gagacagcttgtggttattgataca

SEQ ID NO: 192624 - DNA, 25 bp, Saccharomyces pastorianus
atggttacggttccaaacttctctg

SEQ ID NO: 192625 - DNA, 25 bp, Saccharomyces pastorianus
ggaattcgccaatactgttctcaga

SEQ ID NO: 192626 - DNA, 25 bp, Saccharomyces pastorianus
aagcgtctttgtcagttggttccac

SEQ ID NO: 192627 - DNA, 25 bp, Saccharomyces pastorianus
atggtatttcagtacccctgtatct

SEQ ID NO: 192628 - DNA, 25 bp, Saccharomyces pastorianus
tacctgacggatctgtttgttacac

SEQ ID NO: 192629 - DNA, 25 bp, Saccharomyces pastorianus
ccaaacttctctgggctttcaagga

SEQ ID NO: 192630 - DNA, 25 bp, Saccharomyces pastorianus
acgctttgcgttcttcagtattgct

SEQ ID NO: 192631 - DNA, 25 bp, Saccharomyces pastorianus
cactgattttgaactctggccatat

SEQ ID NO: 192632 - DNA, 25 bp, Saccharomyces pastorianus
gtatgtgcagttctttcatctatga

SEQ ID NO: 192633 - DNA, 25 bp, Saccharomyces pastorianus
tgcttacttaaacggtctccttact

SEQ ID NO: 192634 - DNA, 25 bp, Saccharomyces pastorianus
attcactgcatatcctctatgtatg

SEQ ID NO: 192635 - DNA, 25 bp, Saccharomyces pastorianus
gatttgtgaaatgcatactccgttg

SEQ ID NO: 192636 - DNA, 25 bp, Saccharomyces pastorianus
gaaaattatgtgctcattgtgaaaa

SEQ ID NO: 192637 - DNA, 25 bp, Saccharomyces pastorianus
gggcaacatagatttaagtgtggat

SEQ ID NO: 192638 - DNA, 25 bp, Saccharomyces pastorianus
acgtgagtacgcagaggagatagaa

SEQ ID NO: 192639 - DNA, 25 bp, Saccharomyces pastorianus
gaaatgcatactccgttggatgtgg

SEQ ID NO: 192640 - DNA, 25 bp, Saccharomyces pastorianus
ttgtgaaatgcatactccgttggat

SEQ ID NO: 192641 - DNA, 25 bp, Saccharomyces pastorianus
ggaagttaccgtttatattgatttg

SEQ ID NO: 192642 - DNA, 25 bp, Saccharomyces pastorianus
gtgaaatgcatactccgttggatgt

SEQ ID NO: 192643 - DNA, 25 bp, Saccharomyces pastorianus
atccaatattgaaaaacgtgagtac

SEQ ID NO: 192644 - DNA, 25 bp, Saccharomyces pastorianus
gttaccgtttatattgatttgtgaa

SEQ ID NO: 192645 - DNA, 25 bp, Saccharomyces pastorianus
tattatttgttttcaatagacgttt

SEQ ID NO: 192646 - DNA, 25 bp, Saccharomyces pastorianus
aaccaaccatattacaagtcacaaa

SEQ ID NO: 192647 - DNA, 25 bp, Saccharomyces pastorianus
gtaaccaaccatattacaagtcaca

SEQ ID NO: 192648 - DNA, 25 bp, Saccharomyces pastorianus
tggtaaccaaccatattacaagtca

SEQ ID NO: 192649 - DNA, 25 bp, Saccharomyces pastorianus
atggtaaccaaccatattacaagtc

SEQ ID NO: 192650 - DNA, 25 bp, Saccharomyces pastorianus
tatggtaaccaaccatattacaagt

SEQ ID NO: 192651 - DNA, 25 bp, Saccharomyces pastorianus
accaaccatattacaagtcacaaat

SEQ ID NO: 192652 - DNA, 25 bp, Saccharomyces pastorianus
ggtaaccaaccatattacaagtcac

SEQ ID NO: 192653 - DNA, 25 bp, Saccharomyces pastorianus
taaccaaccatattacaagtcacaa

SEQ ID NO: 192654 - DNA, 25 bp, Saccharomyces pastorianus
ttaaaggcaggatttcacagaacgc

SEQ ID NO: 192655 - DNA, 25 bp, Saccharomyces pastorianus
ctacagcaaagtgagactgcggtaa

SEQ ID NO: 192656 - DNA, 25 bp, Saccharomyces pastorianus
ttgaaggttgccctacagcaaagtg

SEQ ID NO: 192657 - DNA, 25 bp, Saccharomyces pastorianus
gcaagaagttaagtcttttgagaca

SEQ ID NO: 192658 - DNA, 25 bp, Saccharomyces pastorianus
gaaaatttgaaggttgccctacagc

SEQ ID NO: 192659 - DNA, 25 bp, Saccharomyces pastorianus
aacacatgacgaaaagagcacttta

SEQ ID NO: 192660 - DNA, 25 bp, Saccharomyces pastorianus
ggttgccctacagcaaagtgagact

SEQ ID NO: 192661 - DNA, 25 bp, Saccharomyces pastorianus
ggcaggatttcacagaacgcaacac

SEQ ID NO: 192662 - DNA, 25 bp, Saccharomyces pastorianus
gagactgcggtaaataagttagaga

SEQ ID NO: 192663 - DNA, 25 bp, Saccharomyces pastorianus
tttcacagaacgcaacacatgacga

SEQ ID NO: 192664 - DNA, 25 bp, Saccharomyces pastorianus
ggaattcagcaagaagttaagtctt

SEQ ID NO: 192665 - DNA, 25 bp, Saccharomyces pastorianus
tagtaagcttcgcttgtactcagtc

SEQ ID NO: 192666 - DNA, 25 bp, Saccharomyces pastorianus
taagcttcgcttgtactcagtcatt

SEQ ID NO: 192667 - DNA, 25 bp, Saccharomyces pastorianus
tttcttccaaatttgaataggacac

SEQ ID NO: 192668 - DNA, 25 bp, Saccharomyces pastorianus
ggtgttatccaattatttagtaagc

SEQ ID NO: 192669 - DNA, 25 bp, Saccharomyces pastorianus
tccaattatttagtaagcttcgctt

SEQ ID NO: 192670 - DNA, 25 bp, Saccharomyces pastorianus
agcttcgcttgtactcagtcatttt

SEQ ID NO: 192671 - DNA, 25 bp, Saccharomyces pastorianus
cttcgcttgtactcagtcatttttt

SEQ ID NO: 192672 - DNA, 25 bp, Saccharomyces pastorianus
gtaagcttcgcttgtactcagtcat

SEQ ID NO: 192673 - DNA, 25 bp, Saccharomyces pastorianus
atttagtaagcttcgcttgtactca

SEQ ID NO: 192674 - DNA, 25 bp, Saccharomyces pastorianus
tccaaatttgaataggacacgatcg

SEQ ID NO: 192675 - DNA, 25 bp, Saccharomyces pastorianus
aagcttcgcttgtactcagtcattt

SEQ ID NO: 192676 - DNA, 25 bp, Saccharomyces pastorianus
gaacttgatgctgatggagacacta

SEQ ID NO: 192677 - DNA, 25 bp, Saccharomyces pastorianus
ggagacactatcatcggtgccacaa

SEQ ID NO: 192678 - DNA, 25 bp, Saccharomyces pastorianus
gaagaatacgactctgactatgatt

SEQ ID NO: 192679 - DNA, 25 bp, Saccharomyces pastorianus
ggtgccacaacccacttacaagaag

SEQ ID NO: 192680 - DNA, 25 bp, Saccharomyces pastorianus
gagggacatcgcctgaacgaatgta

SEQ ID NO: 192681 - DNA, 25 bp, Saccharomyces pastorianus
gattcttcccaggattcgaacttga

SEQ ID NO: 192682 - DNA, 25 bp, Saccharomyces pastorianus
tgcaatcacgcaactttccgaagct

SEQ ID NO: 192683 - DNA, 25 bp, Saccharomyces pastorianus
ctaaacttggtattgagcgtctcaa

SEQ ID NO: 192684 - DNA, 25 bp, Saccharomyces pastorianus
aaaatcggctatgcttctattgtaa

SEQ ID NO: 192685 - DNA, 25 bp, Saccharomyces pastorianus
gagcgtctcaaccaacgattcagaa

SEQ ID NO: 192686 - DNA, 25 bp, Saccharomyces pastorianus
gggacagaatgccaccagacttcat

SEQ ID NO: 192687 - DNA, 25 bp, Saccharomyces pastorianus
attggtgtccctatgtaatacaatt

SEQ ID NO: 192688 - DNA, 25 bp, Saccharomyces pastorianus
tccctatgtaatacaattacgatta

SEQ ID NO: 192689 - DNA, 25 bp, Saccharomyces pastorianus
gaattggtgtccctatgtaatacaa

SEQ ID NO: 192690 - DNA, 25 bp, Saccharomyces pastorianus
tgtccctatgtaatacaattacgat

SEQ ID NO: 192691 - DNA, 25 bp, Saccharomyces pastorianus
ccctatgtaatacaattacgattat

SEQ ID NO: 192692 - DNA, 25 bp, Saccharomyces pastorianus
ggtgtccctatgtaatacaattacg

SEQ ID NO: 192693 - DNA, 25 bp, Saccharomyces pastorianus
tggtgtccctatgtaatacaattac

SEQ ID NO: 192694 - DNA, 25 bp, Saccharomyces pastorianus
gtgtccctatgtaatacaattacga

SEQ ID NO: 192695 - DNA, 25 bp, Saccharomyces pastorianus
gtccctatgtaatacaattacgatt

SEQ ID NO: 192696 - DNA, 25 bp, Saccharomyces pastorianus
ttggtgtccctatgtaatacaatta

SEQ ID NO: 192697 - DNA, 25 bp, Saccharomyces pastorianus
aattggtgtccctatgtaatacaat

SEQ ID NO: 192698 - DNA, 25 bp, Saccharomyces pastorianus
atctccacagaaaacgaacattaat

SEQ ID NO: 192699 - DNA, 25 bp, Saccharomyces pastorianus
aaattattatcccacttgcataaaa

SEQ ID NO: 192700 - DNA, 25 bp, Saccharomyces pastorianus
accaagagcagtttacaatcaaata

SEQ ID NO: 192701 - DNA, 25 bp, Saccharomyces pastorianus
gtttgtgatcgtctcattccaacat

SEQ ID NO: 192702 - DNA, 25 bp, Saccharomyces pastorianus
ttctcattcgcataatctcactcca

SEQ ID NO: 192703 - DNA, 25 bp, Saccharomyces pastorianus
aaataagttatattgctccgaagat

SEQ ID NO: 192704 - DNA, 25 bp, Saccharomyces pastorianus
gaaggattcgaaccctcttaatgag

SEQ ID NO: 192705 - DNA, 25 bp, Saccharomyces pastorianus
atcaaaaacttctcattcgcataat

SEQ ID NO: 192706 - DNA, 25 bp, Saccharomyces pastorianus
gtaagctgaaggattcgaaccctct

SEQ ID NO: 192707 - DNA, 25 bp, Saccharomyces pastorianus
tctcattccaacatctccacagaaa

SEQ ID NO: 192708 - DNA, 25 bp, Saccharomyces pastorianus
tcgaaccctcttaatgagaaattat

SEQ ID NO: 192709 - DNA, 25 bp, Saccharomyces pastorianus
ttgattccttttccggcgctaagat

SEQ ID NO: 192710 - DNA, 25 bp, Saccharomyces pastorianus
gctggtgtccaaggttccaaggttt

SEQ ID NO: 192711 - DNA, 25 bp, Saccharomyces pastorianus
gttgaagttgattccttttccggcg

SEQ ID NO: 192712 - DNA, 25 bp, Saccharomyces pastorianus
gaagttgattccttttccggcgcta

SEQ ID NO: 192713 - DNA, 25 bp, Saccharomyces pastorianus
aaaaggctaagtccgctggtgtcca

SEQ ID NO: 192714 - DNA, 25 bp, Saccharomyces pastorianus
ggctaagtccgctggtgtccaaggt

SEQ ID NO: 192715 - DNA, 25 bp, Saccharomyces pastorianus
ttttccggcgctaagatctacccag

SEQ ID NO: 192716 - DNA, 25 bp, Saccharomyces pastorianus
tccggcgctaagatctacccaggta

SEQ ID NO: 192717 - DNA, 25 bp, Saccharomyces pastorianus
cggcgctaagatctacccaggtaga

SEQ ID NO: 192718 - DNA, 25 bp, Saccharomyces pastorianus
agtccgctggtgtccaaggttccaa

SEQ ID NO: 192719 - DNA, 25 bp, Saccharomyces pastorianus
tgtccaaggttccaaggtttccaag

SEQ ID NO: 192720 - DNA, 25 bp, Saccharomyces pastorianus
aaccaaccatattacaagtcacaaa

SEQ ID NO: 192721 - DNA, 25 bp, Saccharomyces pastorianus
gtaaccaaccatattacaagtcaca

SEQ ID NO: 192722 - DNA, 25 bp, Saccharomyces pastorianus
tggtaaccaaccatattacaagtca

SEQ ID NO: 192723 - DNA, 25 bp, Saccharomyces pastorianus
atggtaaccaaccatattacaagtc

SEQ ID NO: 192724 - DNA, 25 bp, Saccharomyces pastorianus
tatggtaaccaaccatattacaagt

SEQ ID NO: 192725 - DNA, 25 bp, Saccharomyces pastorianus
accaaccatattacaagtcacaaat

SEQ ID NO: 192726 - DNA, 25 bp, Saccharomyces pastorianus
ggtaaccaaccatattacaagtcac

SEQ ID NO: 192727 - DNA, 25 bp, Saccharomyces pastorianus
taaccaaccatattacaagtcacaa

SEQ ID NO: 192728 - DNA, 25 bp, Saccharomyces pastorianus
atgtctcgccaaagcgcattcaaat

SEQ ID NO: 192729 - DNA, 25 bp, Saccharomyces pastorianus
cgaacgagcctgtctgtcagatgtt

SEQ ID NO: 192730 - DNA, 25 bp, Saccharomyces pastorianus
aatagcattttcttggtatcctttg

SEQ ID NO: 192731 - DNA, 25 bp, Saccharomyces pastorianus
gccaaagcgcattcaaatttcagaa

SEQ ID NO: 192732 - DNA, 25 bp, Saccharomyces pastorianus
gagcctgtctgtcagatgttcacaa

SEQ ID NO: 192733 - DNA, 25 bp, Saccharomyces pastorianus
cttggtatcctttgaatcttatata

SEQ ID NO: 192734 - DNA, 25 bp, Saccharomyces pastorianus
gtctgtcagatgttcacaaaatcct

SEQ ID NO: 192735 - DNA, 25 bp, Saccharomyces pastorianus
tggaaatagacacgaacgagcctgt

SEQ ID NO: 192736 - DNA, 25 bp, Saccharomyces pastorianus
gatgttcacaaaatccttattataa

SEQ ID NO: 192737 - DNA, 25 bp, Saccharomyces pastorianus
gcattttcttggtatcctttgaatc

SEQ ID NO: 192738 - DNA, 25 bp, Saccharomyces pastorianus
acacgaacgagcctgtctgtcagat

SEQ ID NO: 192739 - DNA, 25 bp, Saccharomyces pastorianus
atgcgtttccattcaggttactaac

SEQ ID NO: 192740 - DNA, 25 bp, Saccharomyces pastorianus
atttgatactgctattacttcatgg

SEQ ID NO: 192741 - DNA, 25 bp, Saccharomyces pastorianus
gagtagtctttttcatcactatata

SEQ ID NO: 192742 - DNA, 25 bp, Saccharomyces pastorianus
gagcgcaacgacttagcgaagctta

SEQ ID NO: 192743 - DNA, 25 bp, Saccharomyces pastorianus
aatgttatccgtggaatcttcctta

SEQ ID NO: 192744 - DNA, 25 bp, Saccharomyces pastorianus
gtgctgcttcacatttcaggctaaa

SEQ ID NO: 192745 - DNA, 25 bp, Saccharomyces pastorianus
aatatgttccatgcgtttccattca

SEQ ID NO: 192746 - DNA, 25 bp, Saccharomyces pastorianus
ggaaagatgtcaaggctcgaatagc

SEQ ID NO: 192747 - DNA, 25 bp, Saccharomyces pastorianus
aaattagtttcccaccgatgagcgc

SEQ ID NO: 192748 - DNA, 25 bp, Saccharomyces pastorianus
ggaatcttccttagccaagtatcat

SEQ ID NO: 192749 - DNA, 25 bp, Saccharomyces pastorianus
tgaaattggtgacagcagctctatg

SEQ ID NO: 192750 - DNA, 25 bp, Saccharomyces pastorianus
gtatcacctacacaggatagaaaag

SEQ ID NO: 192751 - DNA, 25 bp, Saccharomyces pastorianus
ggatcacaagtatcacctacacagg

SEQ ID NO: 192752 - DNA, 25 bp, Saccharomyces pastorianus
acaagtatcacctacacaggataga

SEQ ID NO: 192753 - DNA, 25 bp, Saccharomyces pastorianus
caccttaaacgtatctttcgaagag

SEQ ID NO: 192754 - DNA, 25 bp, Saccharomyces pastorianus
atgcgaacaccttaaacgtatcttt

SEQ ID NO: 192755 - DNA, 25 bp, Saccharomyces pastorianus
aaaagaattggatcaagttgtggga

SEQ ID NO: 192756 - DNA, 25 bp, Saccharomyces pastorianus
tcacctgataaagatcatgaggatg

SEQ ID NO: 192757 - DNA, 25 bp, Saccharomyces pastorianus
gattccatcggattaacattatcac

SEQ ID NO: 192758 - DNA, 25 bp, Saccharomyces pastorianus
atggatgcgaacaccttaaacgtat

SEQ ID NO: 192759 - DNA, 25 bp, Saccharomyces pastorianus
gaggatggatcacaagtatcaccta

SEQ ID NO: 192760 - DNA, 25 bp, Saccharomyces pastorianus
tcggattaacattatcacctgataa

SEQ ID NO: 192761 - DNA, 25 bp, Saccharomyces pastorianus
ttggatattttagcaacgcctgctt

SEQ ID NO: 192762 - DNA, 25 bp, Saccharomyces pastorianus
gcttttggatattttagcaacgcct

SEQ ID NO: 192763 - DNA, 25 bp, Saccharomyces pastorianus
atattttagcaacgcctgcttcaaa

SEQ ID NO: 192764 - DNA, 25 bp, Saccharomyces pastorianus
gggctgcttttggatattttagcaa

SEQ ID NO: 192765 - DNA, 25 bp, Saccharomyces pastorianus
acagggctgcttttggatattttag

SEQ ID NO: 192766 - DNA, 25 bp, Saccharomyces pastorianus
cacagggctgcttttggatatttta

SEQ ID NO: 192767 - DNA, 25 bp, Saccharomyces pastorianus
ggatattttagcaacgcctgcttca

SEQ ID NO: 192768 - DNA, 25 bp, Saccharomyces pastorianus
ggaccacagggctgcttttggatat

SEQ ID NO: 192769 - DNA, 25 bp, Saccharomyces pastorianus
ttttggatattttagcaacgcctgc

SEQ ID NO: 192770 - DNA, 25 bp, Saccharomyces pastorianus
tttagcaacgcctgcttcaaagtca

SEQ ID NO: 192771 - DNA, 25 bp, Saccharomyces pastorianus
gaccacagggctgcttttggatatt

SEQ ID NO: 192772 - DNA, 25 bp, Saccharomyces pastorianus
tgttacctacgttaggtacgctagg

SEQ ID NO: 192773 - DNA, 25 bp, Saccharomyces pastorianus
gatccaaatcatgttacctacgtta

SEQ ID NO: 192774 - DNA, 25 bp, Saccharomyces pastorianus
tccaaatcatgttacctacgttagg

SEQ ID NO: 192775 - DNA, 25 bp, Saccharomyces pastorianus
aactttttataccttgcccagagcg

SEQ ID NO: 192776 - DNA, 25 bp, Saccharomyces pastorianus
tcttacgttgtttgtatcatcccac

SEQ ID NO: 192777 - DNA, 25 bp, Saccharomyces pastorianus
tttttataccttgcccagagcgcct

SEQ ID NO: 192778 - DNA, 25 bp, Saccharomyces pastorianus
tacgttgtttgtatcatcccacgat

SEQ ID NO: 192779 - DNA, 25 bp, Saccharomyces pastorianus
taccttgcccagagcgcctcaagaa

SEQ ID NO: 192780 - DNA, 25 bp, Saccharomyces pastorianus
ggaactttttataccttgcccagag

SEQ ID NO: 192781 - DNA, 25 bp, Saccharomyces pastorianus
catcttacgttgtttgtatcatccc

SEQ ID NO: 192782 - DNA, 25 bp, Saccharomyces pastorianus
ttataccttgcccagagcgcctcaa

SEQ ID NO: 192783 - DNA, 25 bp, Saccharomyces pastorianus
atttgcataatgtcttcatttcacg

SEQ ID NO: 192784 - DNA, 25 bp, Saccharomyces pastorianus
ttcacgaaatgatggcactatagca

SEQ ID NO: 192785 - DNA, 25 bp, Saccharomyces pastorianus
tttccggaatatgaggatgatcgtt

SEQ ID NO: 192786 - DNA, 25 bp, Saccharomyces pastorianus
aatgatggcactatagcacgtccct

SEQ ID NO: 192787 - DNA, 25 bp, Saccharomyces pastorianus
agcacgtcccttgtttcttgtggtg

SEQ ID NO: 192788 - DNA, 25 bp, Saccharomyces pastorianus
atggcactatagcacgtcccttgtt

SEQ ID NO: 192789 - DNA, 25 bp, Saccharomyces pastorianus
gtttcttgtggtgctgttttttatc

SEQ ID NO: 192790 - DNA, 25 bp, Saccharomyces pastorianus
gcataatgtcttcatttcacgaaat

SEQ ID NO: 192791 - DNA, 25 bp, Saccharomyces pastorianus
atagcacgtcccttgtttcttgtgg

SEQ ID NO: 192792 - DNA, 25 bp, Saccharomyces pastorianus
acgtcccttgtttcttgtggtgctg

SEQ ID NO: 192793 - DNA, 25 bp, Saccharomyces pastorianus
actatagcacgtcccttgtttcttg

SEQ ID NO: 192794 - DNA, 25 bp, Saccharomyces pastorianus
ggattttttctaaatgctgccaaga

SEQ ID NO: 192795 - DNA, 25 bp, Saccharomyces pastorianus
atagggaacttaggcctgactcgac

SEQ ID NO: 192796 - DNA, 25 bp, Saccharomyces pastorianus
gcaaatctgttttccattgctcaat

SEQ ID NO: 192797 - DNA, 25 bp, Saccharomyces pastorianus
gcatgtattgcaaatctgttttcca

SEQ ID NO: 192798 - DNA, 25 bp, Saccharomyces pastorianus
atttgagcccaattgcagacgatca

SEQ ID NO: 192799 - DNA, 25 bp, Saccharomyces pastorianus
atgctgccaagattgtcctaatcta

SEQ ID NO: 192800 - DNA, 25 bp, Saccharomyces pastorianus
gggaaccttacatgaatccttaaga

SEQ ID NO: 192801 - DNA, 25 bp, Saccharomyces pastorianus
attatctacaaggtgcacagagaca

SEQ ID NO: 192802 - DNA, 25 bp, Saccharomyces pastorianus
gcctgactcgaccaatttctcaaaa

SEQ ID NO: 192803 - DNA, 25 bp, Saccharomyces pastorianus
agaagctatcatgggaaccttacat

SEQ ID NO: 192804 - DNA, 25 bp, Saccharomyces pastorianus
acaacgtttgtacaacattccacat

SEQ ID NO: 192805 - DNA, 25 bp, Saccharomyces pastorianus
attacccacatgaaagagtctttta

SEQ ID NO: 192806 - DNA, 25 bp, Saccharomyces pastorianus
ataatccagtacttggttcggtata

SEQ ID NO: 192807 - DNA, 25 bp, Saccharomyces pastorianus
gaagcagagcttcatgccatttatg

SEQ ID NO: 192808 - DNA, 25 bp, Saccharomyces pastorianus
gccatttatgaaggctatgcagact

SEQ ID NO: 192809 - DNA, 25 bp, Saccharomyces pastorianus
ggctagactagtaaattacccacat

SEQ ID NO: 192810 - DNA, 25 bp, Saccharomyces pastorianus
gacattgtcatgatcactgactcaa

SEQ ID NO: 192811 - DNA, 25 bp, Saccharomyces pastorianus
tggaatacactatgaccgagactgt

SEQ ID NO: 192812 - DNA, 25 bp, Saccharomyces pastorianus
gatgtgtatcatcaacagaagcaga

SEQ ID NO: 192813 - DNA, 25 bp, Saccharomyces pastorianus
acaaaaccagtatcagcatctgatt

SEQ ID NO: 192814 - DNA, 25 bp, Saccharomyces pastorianus
taaatcgcagctatcaacaaccaaa

SEQ ID NO: 192815 - DNA, 25 bp, Saccharomyces pastorianus
gactcaaagccagccattcaaggat

SEQ ID NO: 192816 - DNA, 25 bp, Saccharomyces pastorianus
agaacctttggtcttggctaatctc

SEQ ID NO: 192817 - DNA, 25 bp, Saccharomyces pastorianus
acctttggtcttggctaatctcaaa

SEQ ID NO: 192818 - DNA, 25 bp, Saccharomyces pastorianus
aagagaacctttggtcttggctaat

SEQ ID NO: 192819 - DNA, 25 bp, Saccharomyces pastorianus
gaacctttggtcttggctaatctca

SEQ ID NO: 192820 - DNA, 25 bp, Saccharomyces pastorianus
gagaacctttggtcttggctaatct

SEQ ID NO: 192821 - DNA, 25 bp, Saccharomyces pastorianus
atctttaagagaacctttggtcttg

SEQ ID NO: 192822 - DNA, 25 bp, Saccharomyces pastorianus
gcatctttaagagaacctttggtct

SEQ ID NO: 192823 - DNA, 25 bp, Saccharomyces pastorianus
agagaacctttggtcttggctaatc

SEQ ID NO: 192824 - DNA, 25 bp, Saccharomyces pastorianus
ttttgcatctttaagagaacctttg

SEQ ID NO: 192825 - DNA, 25 bp, Saccharomyces pastorianus
ttaagagaacctttggtcttggcta

SEQ ID NO: 192826 - DNA, 25 bp, Saccharomyces pastorianus
aacctttggtcttggctaatctcaa

SEQ ID NO: 192827 - DNA, 25 bp, Saccharomyces pastorianus
gaacgattgtcttctgggacttcga

SEQ ID NO: 192828 - DNA, 25 bp, Saccharomyces pastorianus
tcatctctgggcgacgaatcgtcat

SEQ ID NO: 192829 - DNA, 25 bp, Saccharomyces pastorianus
ttatctttcatttcatctctgggcg

SEQ ID NO: 192830 - DNA, 25 bp, Saccharomyces pastorianus
gacttcgatcatatttcctttggcc

SEQ ID NO: 192831 - DNA, 25 bp, Saccharomyces pastorianus
gtatcatactttttagccattagct

SEQ ID NO: 192832 - DNA, 25 bp, Saccharomyces pastorianus
gttacaactgtttttggagctcaag

SEQ ID NO: 192833 - DNA, 25 bp, Saccharomyces pastorianus
gaatcgtcatccatcttttcatcaa

SEQ ID NO: 192834 - DNA, 25 bp, Saccharomyces pastorianus
ctttggcccaaagagttacaactgt

SEQ ID NO: 192835 - DNA, 25 bp, Saccharomyces pastorianus
tccatcttttcatcaaccatcagtt

SEQ ID NO: 192836 - DNA, 25 bp, Saccharomyces pastorianus
gtattcttacgctttgtttggctag

SEQ ID NO: 192837 - DNA, 25 bp, Saccharomyces pastorianus
tagccattagctcagacttacgaat

SEQ ID NO: 192838 - DNA, 25 bp, Saccharomyces pastorianus
gttccttctaacattctgcgtaaga

SEQ ID NO: 192839 - DNA, 25 bp, Saccharomyces pastorianus
attttcagcgcctatgttccttcta

SEQ ID NO: 192840 - DNA, 25 bp, Saccharomyces pastorianus
ggctcaccactaacttttattcttt

SEQ ID NO: 192841 - DNA, 25 bp, Saccharomyces pastorianus
tattcagtcggtaacatcccatgag

SEQ ID NO: 192842 - DNA, 25 bp, Saccharomyces pastorianus
gggtactccagttaggtctgcgatg

SEQ ID NO: 192843 - DNA, 25 bp, Saccharomyces pastorianus
gattttgcccaaaagttacctgaca

SEQ ID NO: 192844 - DNA, 25 bp, Saccharomyces pastorianus
gactggatcgcgaaacgttttgcaa

SEQ ID NO: 192845 - DNA, 25 bp, Saccharomyces pastorianus
tggacgcagtcattgtaccctaaat

SEQ ID NO: 192846 - DNA, 25 bp, Saccharomyces pastorianus
atgggactattttaccgctacaggt

SEQ ID NO: 192847 - DNA, 25 bp, Saccharomyces pastorianus
atttccggtgccatatggacgcagt

SEQ ID NO: 192848 - DNA, 25 bp, Saccharomyces pastorianus
acatgggagacgctgacctggctac

SEQ ID NO: 192849 - DNA, 25 bp, Saccharomyces pastorianus
tgacatctgggtaatcaccacttct

SEQ ID NO: 192850 - DNA, 25 bp, Saccharomyces pastorianus
atgcatgacatctgggtaatcacca

SEQ ID NO: 192851 - DNA, 25 bp, Saccharomyces pastorianus
catgacatctgggtaatcaccactt

SEQ ID NO: 192852 - DNA, 25 bp, Saccharomyces pastorianus
atctgggtaatcaccacttctcccg

SEQ ID NO: 192853 - DNA, 25 bp, Saccharomyces pastorianus
tgggtaatcaccacttctcccgctt

SEQ ID NO: 192854 - DNA, 25 bp, Saccharomyces pastorianus
gtagagcacggatgggaggccttat

SEQ ID NO: 192855 - DNA, 25 bp, Saccharomyces pastorianus
ctcccgcttgctttgagattctgta

SEQ ID NO: 192856 - DNA, 25 bp, Saccharomyces pastorianus
gcacggatgggaggccttatagtaa

SEQ ID NO: 192857 - DNA, 25 bp, Saccharomyces pastorianus
cacttctcccgcttgctttgagatt

SEQ ID NO: 192858 - DNA, 25 bp, Saccharomyces pastorianus
ttctcccgcttgctttgagattctg

SEQ ID NO: 192859 - DNA, 25 bp, Saccharomyces pastorianus
gacatctgggtaatcaccacttctc

SEQ ID NO: 192860 - DNA, 25 bp, Saccharomyces pastorianus
tttttaggcgctttttctatcgtct

SEQ ID NO: 192861 - DNA, 25 bp, Saccharomyces pastorianus
cgctttttctatcgtctcttatctt

SEQ ID NO: 192862 - DNA, 25 bp, Saccharomyces pastorianus
cattcagctccccaaagaagcttac

SEQ ID NO: 192863 - DNA, 25 bp, Saccharomyces pastorianus
agagtcctttcgacctggaagacat

SEQ ID NO: 192864 - DNA, 25 bp, Saccharomyces pastorianus
gacaaagagtggaagctgtttaata

SEQ ID NO: 192865 - DNA, 25 bp, Saccharomyces pastorianus
gtcctttcgacctggaagacattca

SEQ ID NO: 192866 - DNA, 25 bp, Saccharomyces pastorianus
tggaagacattcagctccccaaaga

SEQ ID NO: 192867 - DNA, 25 bp, Saccharomyces pastorianus
ggaagagagtcctttcgacctggaa

SEQ ID NO: 192868 - DNA, 25 bp, Saccharomyces pastorianus
gaagctgtttaatactgagaaggaa

SEQ ID NO: 192869 - DNA, 25 bp, Saccharomyces pastorianus
gaagacattcagctccccaaagaag

SEQ ID NO: 192870 - DNA, 25 bp, Saccharomyces pastorianus
taggcgctttttctatcgtctctta

SEQ ID NO: 192871 - DNA, 25 bp, Saccharomyces pastorianus
ggcaccccacatgtttttgttacta

SEQ ID NO: 192872 - DNA, 25 bp, Saccharomyces pastorianus
aaaattgtcgtttccgtcatggtcg

SEQ ID NO: 192873 - DNA, 25 bp, Saccharomyces pastorianus
aaattgtcgtttccgtcatggtcgg

SEQ ID NO: 192874 - DNA, 25 bp, Saccharomyces pastorianus
tttcactgactttgtttctggcgca

SEQ ID NO: 192875 - DNA, 25 bp, Saccharomyces pastorianus
gtttccgtcatggtcgggaaaaatg

SEQ ID NO: 192876 - DNA, 25 bp, Saccharomyces pastorianus
aatgtacaaaagttcctgacgtttg

SEQ ID NO: 192877 - DNA, 25 bp, Saccharomyces pastorianus
gtacaatttggcaccccacatgttt

SEQ ID NO: 192878 - DNA, 25 bp, Saccharomyces pastorianus
tgtcgtttccgtcatggtcgggaaa

SEQ ID NO: 192879 - DNA, 25 bp, Saccharomyces pastorianus
caaaagttcctgacgtttgttgaag

SEQ ID NO: 192880 - DNA, 25 bp, Saccharomyces pastorianus
tttggcaccccacatgtttttgtta

SEQ ID NO: 192881 - DNA, 25 bp, Saccharomyces pastorianus
gaaaaaattgtcgtttccgtcatgg

SEQ ID NO: 192882 - DNA, 25 bp, Saccharomyces pastorianus
atgcatgcccgtttggtgccgtacg

SEQ ID NO: 192883 - DNA, 25 bp, Saccharomyces pastorianus
tgccgtacgggcacgtgtattattt

SEQ ID NO: 192884 - DNA, 25 bp, Saccharomyces pastorianus
gcaaaaatgcatgcccgtttggtgc

SEQ ID NO: 192885 - DNA, 25 bp, Saccharomyces pastorianus
gaagggcagcaaactttttcaaatg

SEQ ID NO: 192886 - DNA, 25 bp, Saccharomyces pastorianus
atgcaaaaatgcatgcccgtttggt

SEQ ID NO: 192887 - DNA, 25 bp, Saccharomyces pastorianus
gcagcaaactttttcaaatgcaaaa

SEQ ID NO: 192888 - DNA, 25 bp, Saccharomyces pastorianus
tattattttgccggtggcatgccac

SEQ ID NO: 192889 - DNA, 25 bp, Saccharomyces pastorianus
acgtgtattattttgccggtggcat

SEQ ID NO: 192890 - DNA, 25 bp, Saccharomyces pastorianus
gtgtattattttgccggtggcatgc

SEQ ID NO: 192891 - DNA, 25 bp, Saccharomyces pastorianus
cgtacgggcacgtgtattattttgc

SEQ ID NO: 192892 - DNA, 25 bp, Saccharomyces pastorianus
tgcatgcccgtttggtgccgtacgg

SEQ ID NO: 192893 - DNA, 25 bp, Saccharomyces pastorianus
ggtttcgccatgtggcatgccaccg

SEQ ID NO: 192894 - DNA, 25 bp, Saccharomyces pastorianus
ttttaagggtttcgccatgtggcat

SEQ ID NO: 192895 - DNA, 25 bp, Saccharomyces pastorianus
cccagtcttctagccaattatgttg

SEQ ID NO: 192896 - DNA, 25 bp, Saccharomyces pastorianus
aagggtttcgccatgtggcatgcca

SEQ ID NO: 192897 - DNA, 25 bp, Saccharomyces pastorianus
gtcttctagccaattatgttggtaa

SEQ ID NO: 192898 - DNA, 25 bp, Saccharomyces pastorianus
gtaattttaagggtttcgccatgtg

SEQ ID NO: 192899 - DNA, 25 bp, Saccharomyces pastorianus
atgccaccggcaaaataatacacgt

SEQ ID NO: 192900 - DNA, 25 bp, Saccharomyces pastorianus
acacccagtcttctagccaattatg

SEQ ID NO: 192901 - DNA, 25 bp, Saccharomyces pastorianus
atgtggcatgccaccggcaaaataa

SEQ ID NO: 192902 - DNA, 25 bp, Saccharomyces pastorianus
atcacacccagtcttctagccaatt

SEQ ID NO: 192903 - DNA, 25 bp, Saccharomyces pastorianus
caaaataatacacgtgcccgtacgg

SEQ ID NO: 192904 - DNA, 25 bp, Saccharomyces pastorianus
atggtatgtgccattacattacgtg

SEQ ID NO: 192905 - DNA, 25 bp, Saccharomyces pastorianus
acttctgtctctaacaagcgttctt

SEQ ID NO: 192906 - DNA, 25 bp, Saccharomyces pastorianus
tgtaatattctctttagtcccaaaa

SEQ ID NO: 192907 - DNA, 25 bp, Saccharomyces pastorianus
cattacgtgtcaacacttctgtctc

SEQ ID NO: 192908 - DNA, 25 bp, Saccharomyces pastorianus
acttttttaaaactgtgctctcttg

SEQ ID NO: 192909 - DNA, 25 bp, Saccharomyces pastorianus
cattgttgctcagaactatgtaata

SEQ ID NO: 192910 - DNA, 25 bp, Saccharomyces pastorianus
gtgtcaacacttctgtctctaacaa

SEQ ID NO: 192911 - DNA, 25 bp, Saccharomyces pastorianus
aacaagcgttcttactaacatgaaa

SEQ ID NO: 192912 - DNA, 25 bp, Saccharomyces pastorianus
gtgctctcttgttggactggtacct

SEQ ID NO: 192913 - DNA, 25 bp, Saccharomyces pastorianus
gttggactggtacctcgtgacaaag

SEQ ID NO: 192914 - DNA, 25 bp, Saccharomyces pastorianus
gtacctcgtgacaaaggtattggtt

SEQ ID NO: 192915 - DNA, 25 bp, Saccharomyces pastorianus
tccctggtgcagagaatttattgtt

SEQ ID NO: 192916 - DNA, 25 bp, Saccharomyces pastorianus
aggtgttcttgcgttagaaaaggat

SEQ ID NO: 192917 - DNA, 25 bp, Saccharomyces pastorianus
cttatccctggtgcagagaatttat

SEQ ID NO: 192918 - DNA, 25 bp, Saccharomyces pastorianus
agataattatttggacacagtaagc

SEQ ID NO: 192919 - DNA, 25 bp, Saccharomyces pastorianus
gtgttcttgcgttagaaaaggatat

SEQ ID NO: 192920 - DNA, 25 bp, Saccharomyces pastorianus
cttgcgttagaaaaggatatggcag

SEQ ID NO: 192921 - DNA, 25 bp, Saccharomyces pastorianus
ttccaaaattggacaataccgataa

SEQ ID NO: 192922 - DNA, 25 bp, Saccharomyces pastorianus
ggcagataattatttggacacagta

SEQ ID NO: 192923 - DNA, 25 bp, Saccharomyces pastorianus
ccctggtgcagagaatttattgtta

SEQ ID NO: 192924 - DNA, 25 bp, Saccharomyces pastorianus
atatggcagataattatttggacac

SEQ ID NO: 192925 - DNA, 25 bp, Saccharomyces pastorianus
ttatccctggtgcagagaatttatt

SEQ ID NO: 192926 - DNA, 25 bp, Saccharomyces pastorianus
tgacgcatcgcgcagtgccctgtca

SEQ ID NO: 192927 - DNA, 25 bp, Saccharomyces pastorianus
tctgcagtgaccttgagcgcggcaa

SEQ ID NO: 192928 - DNA, 25 bp, Saccharomyces pastorianus
gcaacgaaacggcattcaacggaag

SEQ ID NO: 192929 - DNA, 25 bp, Saccharomyces pastorianus
ggcattcaacggaagatcgtctgca

SEQ ID NO: 192930 - DNA, 25 bp, Saccharomyces pastorianus
acggaagatcgtctgcagtgacctt

SEQ ID NO: 192931 - DNA, 25 bp, Saccharomyces pastorianus
ctttgcgcaccaaatgcaacgaaac

SEQ ID NO: 192932 - DNA, 25 bp, Saccharomyces pastorianus
ataatacgggcatgaacgcgtgcat

SEQ ID NO: 192933 - DNA, 25 bp, Saccharomyces pastorianus
aagatcgtctgcagtgaccttgagc

SEQ ID NO: 192934 - DNA, 25 bp, Saccharomyces pastorianus
gcgcggcaataatacgggcatgaac

SEQ ID NO: 192935 - DNA, 25 bp, Saccharomyces pastorianus
ttgagcgcggcaataatacgggcat

SEQ ID NO: 192936 - DNA, 25 bp, Saccharomyces pastorianus
cagtgaccttgagcgcggcaataat

SEQ ID NO: 192937 - DNA, 25 bp, Saccharomyces pastorianus
aggcttgtgctcaatggctttatta

SEQ ID NO: 192938 - DNA, 25 bp, Saccharomyces pastorianus
ggagaggcttgtgctcaatggcttt

SEQ ID NO: 192939 - DNA, 25 bp, Saccharomyces pastorianus
cattactggagaggcttgtgctcaa

SEQ ID NO: 192940 - DNA, 25 bp, Saccharomyces pastorianus
acattactggagaggcttgtgctca

SEQ ID NO: 192941 - DNA, 25 bp, Saccharomyces pastorianus
agaggcttgtgctcaatggctttat

SEQ ID NO: 192942 - DNA, 25 bp, Saccharomyces pastorianus
cttgtgctcaatggctttattaaaa

SEQ ID NO: 192943 - DNA, 25 bp, Saccharomyces pastorianus
ctggagaggcttgtgctcaatggct

SEQ ID NO: 192944 - DNA, 25 bp, Saccharomyces pastorianus
gtgctcaatggctttattaaaagct

SEQ ID NO: 192945 - DNA, 25 bp, Saccharomyces pastorianus
gcttgtgctcaatggctttattaaa

SEQ ID NO: 192946 - DNA, 25 bp, Saccharomyces pastorianus
ttactggagaggcttgtgctcaatg

SEQ ID NO: 192947 - DNA, 25 bp, Saccharomyces pastorianus
gaggcttgtgctcaatggctttatt

SEQ ID NO: 192948 - DNA, 25 bp, Saccharomyces pastorianus
acaacggtactcatcatcagacaaa

SEQ ID NO: 192949 - DNA, 25 bp, Saccharomyces pastorianus
agcacaacggtactcatcatcagac

SEQ ID NO: 192950 - DNA, 25 bp, Saccharomyces pastorianus
gagtcttccactggcagaaatccgt

SEQ ID NO: 192951 - DNA, 25 bp, Saccharomyces pastorianus
tcatcagacaaattacagcagaaag

SEQ ID NO: 192952 - DNA, 25 bp, Saccharomyces pastorianus
gtcttccactggcagaaatccgtat

SEQ ID NO: 192953 - DNA, 25 bp, Saccharomyces pastorianus
agaaatccgtatcagactccgccct

SEQ ID NO: 192954 - DNA, 25 bp, Saccharomyces pastorianus
gcccttagagcacaacggtactcat

SEQ ID NO: 192955 - DNA, 25 bp, Saccharomyces pastorianus
aaagagtcttccactggcagaaatc

SEQ ID NO: 192956 - DNA, 25 bp, Saccharomyces pastorianus
agactccgcccttagagcacaacgg

SEQ ID NO: 192957 - DNA, 25 bp, Saccharomyces pastorianus
acggtactcatcatcagacaaatta

SEQ ID NO: 192958 - DNA, 25 bp, Saccharomyces pastorianus
ggcagaaatccgtatcagactccgc

SEQ ID NO: 192959 - DNA, 25 bp, Saccharomyces pastorianus
ctaaagtactgaacacctgaatgat

SEQ ID NO: 192960 - DNA, 25 bp, Saccharomyces pastorianus
gaatttagccgtttccccattacag

SEQ ID NO: 192961 - DNA, 25 bp, Saccharomyces pastorianus
acttcatttacttttgagctagtta

SEQ ID NO: 192962 - DNA, 25 bp, Saccharomyces pastorianus
tcattttgaaccagttaacgtccca

SEQ ID NO: 192963 - DNA, 25 bp, Saccharomyces pastorianus
caactatcatgctaaatttgctgtg

SEQ ID NO: 192964 - DNA, 25 bp, Saccharomyces pastorianus
tttgtgaatttagccgtttccccat

SEQ ID NO: 192965 - DNA, 25 bp, Saccharomyces pastorianus
gatacaactaattacatgtgcagtc

SEQ ID NO: 192966 - DNA, 25 bp, Saccharomyces pastorianus
gaatgatacttttattggccctttt

SEQ ID NO: 192967 - DNA, 25 bp, Saccharomyces pastorianus
attttcatcatttcctaaagtactg

SEQ ID NO: 192968 - DNA, 25 bp, Saccharomyces pastorianus
tggcccttttaataagaactctggt

SEQ ID NO: 192969 - DNA, 25 bp, Saccharomyces pastorianus
atttgctgtgatatcattttgaacc

SEQ ID NO: 192970 - DNA, 25 bp, Saccharomyces pastorianus
tttctgctttagtctctaattcatc

SEQ ID NO: 192971 - DNA, 25 bp, Saccharomyces pastorianus
aagtccacaatttcttcagcgttta

SEQ ID NO: 192972 - DNA, 25 bp, Saccharomyces pastorianus
gtaattctactttcttttctgcttt

SEQ ID NO: 192973 - DNA, 25 bp, Saccharomyces pastorianus
ggtaatgtgaagtccacaatttctt

SEQ ID NO: 192974 - DNA, 25 bp, Saccharomyces pastorianus
tcttttctgctttagtctctaattc

SEQ ID NO: 192975 - DNA, 25 bp, Saccharomyces pastorianus
atgtaattctactttcttttctgct

SEQ ID NO: 192976 - DNA, 25 bp, Saccharomyces pastorianus
tgctttagtctctaattcatctaga

SEQ ID NO: 192977 - DNA, 25 bp, Saccharomyces pastorianus
gaagtccacaatttcttcagcgttt

SEQ ID NO: 192978 - DNA, 25 bp, Saccharomyces pastorianus
tagtctctaattcatctagacctgg

SEQ ID NO: 192979 - DNA, 25 bp, Saccharomyces pastorianus
ttctctttccatgtaattctacttt

SEQ ID NO: 192980 - DNA, 25 bp, Saccharomyces pastorianus
ctctaattcatctagacctggaggg

SEQ ID NO: 192981 - DNA, 25 bp, Saccharomyces pastorianus
atgtctggtggtgctgaaaccggta

SEQ ID NO: 192982 - DNA, 25 bp, Saccharomyces pastorianus
gtctccatatggtgtcttcaacagt

SEQ ID NO: 192983 - DNA, 25 bp, Saccharomyces pastorianus
ggatccatcgaaaacagagcccgtt

SEQ ID NO: 192984 - DNA, 25 bp, Saccharomyces pastorianus
agttgtcgatgctattggccctgaa

SEQ ID NO: 192985 - DNA, 25 bp, Saccharomyces pastorianus
agtcggtttgagattgtctccatat

SEQ ID NO: 192986 - DNA, 25 bp, Saccharomyces pastorianus
aaaccggtattgttgctcaatatgc

SEQ ID NO: 192987 - DNA, 25 bp, Saccharomyces pastorianus
tgcttattctatctggaagggccca

SEQ ID NO: 192988 - DNA, 25 bp, Saccharomyces pastorianus
ttgctctgcacccagaagttgtcag

SEQ ID NO: 192989 - DNA, 25 bp, Saccharomyces pastorianus
gggatacattgactaccctacgtac

SEQ ID NO: 192990 - DNA, 25 bp, Saccharomyces pastorianus
agttcttggacccacactccaataa

SEQ ID NO: 192991 - DNA, 25 bp, Saccharomyces pastorianus
tattggccctgaaaaagtcggtttg

SEQ ID NO: 192992 - DNA, 25 bp, Saccharomyces pastorianus
cagaattgaactagcgacctttgca

SEQ ID NO: 192993 - DNA, 25 bp, Saccharomyces pastorianus
cacctgccagaattgaactagcgac

SEQ ID NO: 192994 - DNA, 25 bp, Saccharomyces pastorianus
ctgccagaattgaactagcgacctt

SEQ ID NO: 192995 - DNA, 25 bp, Saccharomyces pastorianus
actagcgacctttgcattacaagtg

SEQ ID NO: 192996 - DNA, 25 bp, Saccharomyces pastorianus
atgccacctgccagaattgaactag

SEQ ID NO: 192997 - DNA, 25 bp, Saccharomyces pastorianus
tgccacctgccagaattgaactagc

SEQ ID NO: 192998 - DNA, 25 bp, Saccharomyces pastorianus
gccacctgccagaattgaactagcg

SEQ ID NO: 192999 - DNA, 25 bp, Saccharomyces pastorianus
ccagaattgaactagcgacctttgc

SEQ ID NO: 193000 - DNA, 25 bp, Saccharomyces pastorianus
gccagaattgaactagcgacctttg

SEQ ID NO: 193001 - DNA, 25 bp, Saccharomyces pastorianus
tgccagaattgaactagcgaccttt

SEQ ID NO: 193002 - DNA, 25 bp, Saccharomyces pastorianus
acctgccagaattgaactagcgacc

SEQ ID NO: 193003 - DNA, 25 bp, Saccharomyces pastorianus
tatttttagcctccttagcttagtg

SEQ ID NO: 193004 - DNA, 25 bp, Saccharomyces pastorianus
ggtggcattataccggtattatttt

SEQ ID NO: 193005 - DNA, 25 bp, Saccharomyces pastorianus
tggcattataccggtattatttttt

SEQ ID NO: 193006 - DNA, 25 bp, Saccharomyces pastorianus
gcaggtggcattataccggtattat

SEQ ID NO: 193007 - DNA, 25 bp, Saccharomyces pastorianus
caggtggcattataccggtattatt

SEQ ID NO: 193008 - DNA, 25 bp, Saccharomyces pastorianus
tagttgtatttttagcctccttagc

SEQ ID NO: 193009 - DNA, 25 bp, Saccharomyces pastorianus
aggtggcattataccggtattattt

SEQ ID NO: 193010 - DNA, 25 bp, Saccharomyces pastorianus
aacatagttgtatttttagcctcct

SEQ ID NO: 193011 - DNA, 25 bp, Saccharomyces pastorianus
gtggcattataccggtattattttt

SEQ ID NO: 193012 - DNA, 25 bp, Saccharomyces pastorianus
gttgtatttttagcctccttagctt

SEQ ID NO: 193013 - DNA, 25 bp, Saccharomyces pastorianus
agttgtatttttagcctccttagct

SEQ ID NO: 193014 - DNA, 25 bp, Saccharomyces pastorianus
gcttacagaaccctatcgacatcaa

SEQ ID NO: 193015 - DNA, 25 bp, Saccharomyces pastorianus
cattggcccatcacttcgtaagaag

SEQ ID NO: 193016 - DNA, 25 bp, Saccharomyces pastorianus
aaacaggatcacgacggcaactact

SEQ ID NO: 193017 - DNA, 25 bp, Saccharomyces pastorianus
attcaagactagttctactccgaca

SEQ ID NO: 193018 - DNA, 25 bp, Saccharomyces pastorianus
aggatacaacggcacctatacactc

SEQ ID NO: 193019 - DNA, 25 bp, Saccharomyces pastorianus
cactgaaccgccgacgataattata

SEQ ID NO: 193020 - DNA, 25 bp, Saccharomyces pastorianus
aatcttgtcaccaacattatctaca

SEQ ID NO: 193021 - DNA, 25 bp, Saccharomyces pastorianus
atacctcggccattcaagactagtt

SEQ ID NO: 193022 - DNA, 25 bp, Saccharomyces pastorianus
ggcaactactgcgacactcactgaa

SEQ ID NO: 193023 - DNA, 25 bp, Saccharomyces pastorianus
gtgacatagacataccattggccca

SEQ ID NO: 193024 - DNA, 25 bp, Saccharomyces pastorianus
aaggatggccatttcatacctcggc

SEQ ID NO: 193025 - DNA, 25 bp, Saccharomyces pastorianus
aaaaatattgttggtctgcaccagc

SEQ ID NO: 193026 - DNA, 25 bp, Saccharomyces pastorianus
acttcgaagggcagggcttctagcc

SEQ ID NO: 193027 - DNA, 25 bp, Saccharomyces pastorianus
catcccttccagttttagactcatt

SEQ ID NO: 193028 - DNA, 25 bp, Saccharomyces pastorianus
gcagggaatccctttcagtaatgta

SEQ ID NO: 193029 - DNA, 25 bp, Saccharomyces pastorianus
tttttgtcgggaggagcatcccttc

SEQ ID NO: 193030 - DNA, 25 bp, Saccharomyces pastorianus
gaatatgctcttagcgatgccgctg

SEQ ID NO: 193031 - DNA, 25 bp, Saccharomyces pastorianus
ccatcgtatgtttattttgagctta

SEQ ID NO: 193032 - DNA, 25 bp, Saccharomyces pastorianus
taccttgctacagaaaactgccggg

SEQ ID NO: 193033 - DNA, 25 bp, Saccharomyces pastorianus
gacggtattctcaagttacttcgaa

SEQ ID NO: 193034 - DNA, 25 bp, Saccharomyces pastorianus
ttctagcccaatacacataccttgc

SEQ ID NO: 193035 - DNA, 25 bp, Saccharomyces pastorianus
gatgccgctgctattgacggtattc

SEQ ID NO: 193036 - DNA, 25 bp, Saccharomyces pastorianus
gaaggacaaccaaatctatgctatt

SEQ ID NO: 193037 - DNA, 25 bp, Saccharomyces pastorianus
aggcagtgtcaacgccgcagcagaa

SEQ ID NO: 193038 - DNA, 25 bp, Saccharomyces pastorianus
agctgacatgcaagccgccgcagaa

SEQ ID NO: 193039 - DNA, 25 bp, Saccharomyces pastorianus
aagctagcggtattatgccatctaa

SEQ ID NO: 193040 - DNA, 25 bp, Saccharomyces pastorianus
ggtatcatcagagtcactttcagga

SEQ ID NO: 193041 - DNA, 25 bp, Saccharomyces pastorianus
gtttgaagcaaatcccaggtatcat

SEQ ID NO: 193042 - DNA, 25 bp, Saccharomyces pastorianus
taacgaagacgtcgctaccaagtcc

SEQ ID NO: 193043 - DNA, 25 bp, Saccharomyces pastorianus
aactttacccaaaagctagccgctg

SEQ ID NO: 193044 - DNA, 25 bp, Saccharomyces pastorianus
tgctatcccagaaaacgccaacgtt

SEQ ID NO: 193045 - DNA, 25 bp, Saccharomyces pastorianus
aagtcttcagatctgccggtggtaa

SEQ ID NO: 193046 - DNA, 25 bp, Saccharomyces pastorianus
gtggtaactacgttgtcttcggtga

SEQ ID NO: 193047 - DNA, 25 bp, Saccharomyces pastorianus
gcttcttatgccagtgtgaccgctg

SEQ ID NO: 193048 - DNA, 25 bp, Saccharomyces pastorianus
atgaggaactgaggttgcatgcaag

SEQ ID NO: 193049 - DNA, 25 bp, Saccharomyces pastorianus
aaatcttccatgagagaggcccagc

SEQ ID NO: 193050 - DNA, 25 bp, Saccharomyces pastorianus
gaattagacataccagaaactgttg

SEQ ID NO: 193051 - DNA, 25 bp, Saccharomyces pastorianus
gtgaccgctgtcaaaatgaactatc

SEQ ID NO: 193052 - DNA, 25 bp, Saccharomyces pastorianus
aaaaacctcagtcagattcgattca

SEQ ID NO: 193053 - DNA, 25 bp, Saccharomyces pastorianus
agaggcccagccagatttaaaagaa

SEQ ID NO: 193054 - DNA, 25 bp, Saccharomyces pastorianus
gatggctctaagaaatcaactggta

SEQ ID NO: 193055 - DNA, 25 bp, Saccharomyces pastorianus
atgattgtgaaccaaacgcctatat

SEQ ID NO: 193056 - DNA, 25 bp, Saccharomyces pastorianus
attacgtacgtcaatcccttacatg

SEQ ID NO: 193057 - DNA, 25 bp, Saccharomyces pastorianus
accaaacgcctatattgagcaagta

SEQ ID NO: 193058 - DNA, 25 bp, Saccharomyces pastorianus
gctggcagtgccaacagcttactgg

SEQ ID NO: 193059 - DNA, 25 bp, Saccharomyces pastorianus
agtgccaacagcttactggccggta

SEQ ID NO: 193060 - DNA, 25 bp, Saccharomyces pastorianus
caacagcttactggccggtagtggt

SEQ ID NO: 193061 - DNA, 25 bp, Saccharomyces pastorianus
tggcaacaccatgagtctaacaagt

SEQ ID NO: 193062 - DNA, 25 bp, Saccharomyces pastorianus
aacaagttccgggttgagcactatg

SEQ ID NO: 193063 - DNA, 25 bp, Saccharomyces pastorianus
aaatttcaacgtatgctggcagtgc

SEQ ID NO: 193064 - DNA, 25 bp, Saccharomyces pastorianus
ccatgagtctaacaagttccgggtt

SEQ ID NO: 193065 - DNA, 25 bp, Saccharomyces pastorianus
tggccggtagtggtttaagtgtctt

SEQ ID NO: 193066 - DNA, 25 bp, Saccharomyces pastorianus
ttcaacgtatgctggcagtgccaac

SEQ ID NO: 193067 - DNA, 25 bp, Saccharomyces pastorianus
gtacagcttctttagaaatttcaac

SEQ ID NO: 193068 - DNA, 25 bp, Saccharomyces pastorianus
gttccgggttgagcactatgtcgca

SEQ ID NO: 193069 - DNA, 25 bp, Saccharomyces pastorianus
tttcccttttgtcttttgcaccgct

SEQ ID NO: 193070 - DNA, 25 bp, Saccharomyces pastorianus
ggttcagtctttgtagttcgagcga

SEQ ID NO: 193071 - DNA, 25 bp, Saccharomyces pastorianus
ttgtcttttgcaccgcttatatatg

SEQ ID NO: 193072 - DNA, 25 bp, Saccharomyces pastorianus
ggtacagaaggtgccggttatccgt

SEQ ID NO: 193073 - DNA, 25 bp, Saccharomyces pastorianus
ttgcaccgcttatatatgggtatga

SEQ ID NO: 193074 - DNA, 25 bp, Saccharomyces pastorianus
gcaccgcttatatatgggtatgaaa

SEQ ID NO: 193075 - DNA, 25 bp, Saccharomyces pastorianus
ccgcttatatatgggtatgaaacaa

SEQ ID NO: 193076 - DNA, 25 bp, Saccharomyces pastorianus
cttttgtcttttgcaccgcttatat

SEQ ID NO: 193077 - DNA, 25 bp, Saccharomyces pastorianus
aaacgggcgatgtagtggtacagaa

SEQ ID NO: 193078 - DNA, 25 bp, Saccharomyces pastorianus
cgacattgcgcgtttccttagaaaa

SEQ ID NO: 193079 - DNA, 25 bp, Saccharomyces pastorianus
tatatgggtatgaaacaagttcaag

SEQ ID NO: 193080 - DNA, 25 bp, Saccharomyces pastorianus
tcctgtcaagacatcggctgtaggt

SEQ ID NO: 193081 - DNA, 25 bp, Saccharomyces pastorianus
gtcgctaactttattaaagaataat

SEQ ID NO: 193082 - DNA, 25 bp, Saccharomyces pastorianus
attcctgtcaagacatcggctgtag

SEQ ID NO: 193083 - DNA, 25 bp, Saccharomyces pastorianus
taggtcgctaactttattaaagaat

SEQ ID NO: 193084 - DNA, 25 bp, Saccharomyces pastorianus
tcaactagaaggtggcgttcataat

SEQ ID NO: 193085 - DNA, 25 bp, Saccharomyces pastorianus
actggctctatttgtattacccaag

SEQ ID NO: 193086 - DNA, 25 bp, Saccharomyces pastorianus
tggctctatttgtattacccaagaa

SEQ ID NO: 193087 - DNA, 25 bp, Saccharomyces pastorianus
gtcgttgacaaaggatccattaaga

SEQ ID NO: 193088 - DNA, 25 bp, Saccharomyces pastorianus
attggtatgggaactggctctattt

SEQ ID NO: 193089 - DNA, 25 bp, Saccharomyces pastorianus
tgtaggtcgctaactttattaaaga

SEQ ID NO: 193090 - DNA, 25 bp, Saccharomyces pastorianus
ctgtcaagacatcggctgtaggtcg

SEQ ID NO: 193091 - DNA, 25 bp, Saccharomyces pastorianus
ttgtctaacaccatccagcatgcaa

SEQ ID NO: 193092 - DNA, 25 bp, Saccharomyces pastorianus
cagcatgcaatacagtgacatatat

SEQ ID NO: 193093 - DNA, 25 bp, Saccharomyces pastorianus
tccagcatgcaatacagtgacatat

SEQ ID NO: 193094 - DNA, 25 bp, Saccharomyces pastorianus
ggccttgtctaacaccatccagcat

SEQ ID NO: 193095 - DNA, 25 bp, Saccharomyces pastorianus
aacaccatccagcatgcaatacagt

SEQ ID NO: 193096 - DNA, 25 bp, Saccharomyces pastorianus
catgcaatacagtgacatatatata

SEQ ID NO: 193097 - DNA, 25 bp, Saccharomyces pastorianus
accatccagcatgcaatacagtgac

SEQ ID NO: 193098 - DNA, 25 bp, Saccharomyces pastorianus
gtctaacaccatccagcatgcaata

SEQ ID NO: 193099 - DNA, 25 bp, Saccharomyces pastorianus
tacggccttgtctaacaccatccag

SEQ ID NO: 193100 - DNA, 25 bp, Saccharomyces pastorianus
ctaacaccatccagcatgcaataca

SEQ ID NO: 193101 - DNA, 25 bp, Saccharomyces pastorianus
catccagcatgcaatacagtgacat

SEQ ID NO: 193102 - DNA, 25 bp, Saccharomyces pastorianus
gaattaccaccgattaaggaaggct

SEQ ID NO: 193103 - DNA, 25 bp, Saccharomyces pastorianus
aattaccaccgattaaggaaggctg

SEQ ID NO: 193104 - DNA, 25 bp, Saccharomyces pastorianus
tcgtaagggtgaattaccaccgatt

SEQ ID NO: 193105 - DNA, 25 bp, Saccharomyces pastorianus
gaaaaaaagggccagcatgttggat

SEQ ID NO: 193106 - DNA, 25 bp, Saccharomyces pastorianus
taagggtgaattaccaccgattaag

SEQ ID NO: 193107 - DNA, 25 bp, Saccharomyces pastorianus
aaaaaaagggccagcatgttggatg

SEQ ID NO: 193108 - DNA, 25 bp, Saccharomyces pastorianus
tgaattaccaccgattaaggaaggc

SEQ ID NO: 193109 - DNA, 25 bp, Saccharomyces pastorianus
gaaaggaaaaaaagggccagcatgt

SEQ ID NO: 193110 - DNA, 25 bp, Saccharomyces pastorianus
atcgtaagggtgaattaccaccgat

SEQ ID NO: 193111 - DNA, 25 bp, Saccharomyces pastorianus
aggaaaaaaagggccagcatgttgg

SEQ ID NO: 193112 - DNA, 25 bp, Saccharomyces pastorianus
aaggaaaaaaagggccagcatgttg

SEQ ID NO: 193113 - DNA, 25 bp, Saccharomyces pastorianus
tttctaaccgcttctaacttaattg

SEQ ID NO: 193114 - DNA, 25 bp, Saccharomyces pastorianus
aaatgctcccgctacaatacgagaa

SEQ ID NO: 193115 - DNA, 25 bp, Saccharomyces pastorianus
gcgtaagctggtttataacatactc

SEQ ID NO: 193116 - DNA, 25 bp, Saccharomyces pastorianus
tactcagtgatcgtttccatttggg

SEQ ID NO: 193117 - DNA, 25 bp, Saccharomyces pastorianus
cattgcgaaaatgcttcaatattca

SEQ ID NO: 193118 - DNA, 25 bp, Saccharomyces pastorianus
tattcatttctaccattttccccgt

SEQ ID NO: 193119 - DNA, 25 bp, Saccharomyces pastorianus
taaaatcccccaagtggttcaactg

SEQ ID NO: 193120 - DNA, 25 bp, Saccharomyces pastorianus
aaattggatgcattttttcctatta

SEQ ID NO: 193121 - DNA, 25 bp, Saccharomyces pastorianus
gtgtagtcagggtataaacgttcct

SEQ ID NO: 193122 - DNA, 25 bp, Saccharomyces pastorianus
aattgttcaattggcctatttttca

SEQ ID NO: 193123 - DNA, 25 bp, Saccharomyces pastorianus
ttctaccattttccccgttcaatct

SEQ ID NO: 193124 - DNA, 25 bp, Saccharomyces pastorianus
aatacttttcatatggagcaatccc

SEQ ID NO: 193125 - DNA, 25 bp, Saccharomyces pastorianus
ttctccgctgttgaaagattgaaat

SEQ ID NO: 193126 - DNA, 25 bp, Saccharomyces pastorianus
agttgacttcagtttctaagtggaa

SEQ ID NO: 193127 - DNA, 25 bp, Saccharomyces pastorianus
gacagcatgaacgaacagtatccag

SEQ ID NO: 193128 - DNA, 25 bp, Saccharomyces pastorianus
gataatattcattcagcaacgccga

SEQ ID NO: 193129 - DNA, 25 bp, Saccharomyces pastorianus
cagtatccagtaatgtggacagcaa

SEQ ID NO: 193130 - DNA, 25 bp, Saccharomyces pastorianus
gaagaccttggtcgacccaaatgga

SEQ ID NO: 193131 - DNA, 25 bp, Saccharomyces pastorianus
aaatgaatttttctccgctgttgaa

SEQ ID NO: 193132 - DNA, 25 bp, Saccharomyces pastorianus
taagtggaagaccttggtcgaccca

SEQ ID NO: 193133 - DNA, 25 bp, Saccharomyces pastorianus
ttcagcaacgccgaaatacttttca

SEQ ID NO: 193134 - DNA, 25 bp, Saccharomyces pastorianus
gtggacagcaataagttgacttcag

SEQ ID NO: 193135 - DNA, 25 bp, Saccharomyces pastorianus
aacgtattctgctaaaaatgactgg

SEQ ID NO: 193136 - DNA, 25 bp, Saccharomyces pastorianus
cagtaacgtaagatcagcgagaaca

SEQ ID NO: 193137 - DNA, 25 bp, Saccharomyces pastorianus
gagctttgcttccattcattttatt

SEQ ID NO: 193138 - DNA, 25 bp, Saccharomyces pastorianus
tagattactaacgtattctgctaaa

SEQ ID NO: 193139 - DNA, 25 bp, Saccharomyces pastorianus
aatatttattctgtgtattcctcag

SEQ ID NO: 193140 - DNA, 25 bp, Saccharomyces pastorianus
gtgtattcctcagtaacgtaagatc

SEQ ID NO: 193141 - DNA, 25 bp, Saccharomyces pastorianus
agtactgctgtaatgtttctggatt

SEQ ID NO: 193142 - DNA, 25 bp, Saccharomyces pastorianus
aatgtttctggattatttttctgat

SEQ ID NO: 193143 - DNA, 25 bp, Saccharomyces pastorianus
ttttctgattaattgttctgtttag

SEQ ID NO: 193144 - DNA, 25 bp, Saccharomyces pastorianus
aaaatgactggtgagctttgcttcc

SEQ ID NO: 193145 - DNA, 25 bp, Saccharomyces pastorianus
agcgagaacaaattcccagggttgg

SEQ ID NO: 193146 - DNA, 25 bp, Saccharomyces pastorianus
ggcatgtatatttaccacaaatcga

SEQ ID NO: 193147 - DNA, 25 bp, Saccharomyces pastorianus
ctacacctactagaacacttggaaa

SEQ ID NO: 193148 - DNA, 25 bp, Saccharomyces pastorianus
tactgccgtagaacttgccaaacac

SEQ ID NO: 193149 - DNA, 25 bp, Saccharomyces pastorianus
gtccagacgcgtacccaaagaataa

SEQ ID NO: 193150 - DNA, 25 bp, Saccharomyces pastorianus
gatacagacattaaacaggttacta

SEQ ID NO: 193151 - DNA, 25 bp, Saccharomyces pastorianus
aggatatttaccgaatacccctgct

SEQ ID NO: 193152 - DNA, 25 bp, Saccharomyces pastorianus
gatggacaatccgaacgaacgatac

SEQ ID NO: 193153 - DNA, 25 bp, Saccharomyces pastorianus
aaagtttgtataccgtccagacgcg

SEQ ID NO: 193154 - DNA, 25 bp, Saccharomyces pastorianus
caacgcaagaagttttactgccgta

SEQ ID NO: 193155 - DNA, 25 bp, Saccharomyces pastorianus
gaatacccctgctattaagtcagat

SEQ ID NO: 193156 - DNA, 25 bp, Saccharomyces pastorianus
tatacgtcggaccatttcgagttgt

SEQ ID NO: 193157 - DNA, 25 bp, Saccharomyces pastorianus
ccccaagatatgacgatgagagctc

SEQ ID NO: 193158 - DNA, 25 bp, Saccharomyces pastorianus
cagtgacttgtggaaaatatgatta

SEQ ID NO: 193159 - DNA, 25 bp, Saccharomyces pastorianus
gacttaacagtctcattgcctaaga

SEQ ID NO: 193160 - DNA, 25 bp, Saccharomyces pastorianus
tgagcgggtgatgcgacttaacagt

SEQ ID NO: 193161 - DNA, 25 bp, Saccharomyces pastorianus
gaaatatccaaatttgtggttcatg

SEQ ID NO: 193162 - DNA, 25 bp, Saccharomyces pastorianus
ggtgatgcgacttaacagtctcatt

SEQ ID NO: 193163 - DNA, 25 bp, Saccharomyces pastorianus
caaatttgtggttcatgctctcccc

SEQ ID NO: 193164 - DNA, 25 bp, Saccharomyces pastorianus
gacttagtgaatgtacagtgacttg

SEQ ID NO: 193165 - DNA, 25 bp, Saccharomyces pastorianus
agtctcattgcctaagaaatatcca

SEQ ID NO: 193166 - DNA, 25 bp, Saccharomyces pastorianus
gattttgagcgggtgatgcgactta

SEQ ID NO: 193167 - DNA, 25 bp, Saccharomyces pastorianus
atatgattagattttgagcgggtga

SEQ ID NO: 193168 - DNA, 25 bp, Saccharomyces pastorianus
ggagatgtcttccagttgactgtca

SEQ ID NO: 193169 - DNA, 25 bp, Saccharomyces pastorianus
agtgttattattgatccttatggag

SEQ ID NO: 193170 - DNA, 25 bp, Saccharomyces pastorianus
tagtgcagtgcagttcatgccagat

SEQ ID NO: 193171 - DNA, 25 bp, Saccharomyces pastorianus
gccatctgctgacgacaactgtatt

SEQ ID NO: 193172 - DNA, 25 bp, Saccharomyces pastorianus
tggagagattattgcagggccattg

SEQ ID NO: 193173 - DNA, 25 bp, Saccharomyces pastorianus
gggagattattgaccaagctacagg

SEQ ID NO: 193174 - DNA, 25 bp, Saccharomyces pastorianus
aaattacctggatggccatctgctg

SEQ ID NO: 193175 - DNA, 25 bp, Saccharomyces pastorianus
aaccgccgaaattaacactgacttg

SEQ ID NO: 193176 - DNA, 25 bp, Saccharomyces pastorianus
ggtcgtctattcttgattagtgcag

SEQ ID NO: 193177 - DNA, 25 bp, Saccharomyces pastorianus
aaaaatattgcatacgaaggtcgtc

SEQ ID NO: 193178 - DNA, 25 bp, Saccharomyces pastorianus
acactgacttgattgctgaagctcg

SEQ ID NO: 193179 - DNA, 25 bp, Saccharomyces pastorianus
acggtgactccaaagactccctcaa

SEQ ID NO: 193180 - DNA, 25 bp, Saccharomyces pastorianus
cctcaaccttgatgctactgaagca

SEQ ID NO: 193181 - DNA, 25 bp, Saccharomyces pastorianus
actgagcacggtgactccaaagact

SEQ ID NO: 193182 - DNA, 25 bp, Saccharomyces pastorianus
tgagcacggtgactccaaagactcc

SEQ ID NO: 193183 - DNA, 25 bp, Saccharomyces pastorianus
agcacggtgactccaaagactccct

SEQ ID NO: 193184 - DNA, 25 bp, Saccharomyces pastorianus
tccctcaaccttgatgctactgaag

SEQ ID NO: 193185 - DNA, 25 bp, Saccharomyces pastorianus
tgatgctactgaagcacctattgac

SEQ ID NO: 193186 - DNA, 25 bp, Saccharomyces pastorianus
aaagactccctcaaccttgatgcta

SEQ ID NO: 193187 - DNA, 25 bp, Saccharomyces pastorianus
agactgagcacggtgactccaaaga

SEQ ID NO: 193188 - DNA, 25 bp, Saccharomyces pastorianus
ccttgatgctactgaagcacctatt

SEQ ID NO: 193189 - DNA, 25 bp, Saccharomyces pastorianus
aaccttgatgctactgaagcaccta

SEQ ID NO: 193190 - DNA, 25 bp, Saccharomyces pastorianus
ttctatctcttgaattcgtacaaca

SEQ ID NO: 193191 - DNA, 25 bp, Saccharomyces pastorianus
gcgcctgcgaagtttccattttcgg

SEQ ID NO: 193192 - DNA, 25 bp, Saccharomyces pastorianus
gcgcgcctgcgaagtttccattttc

SEQ ID NO: 193193 - DNA, 25 bp, Saccharomyces pastorianus
ctgcgaagtttccattttcggtcaa

SEQ ID NO: 193194 - DNA, 25 bp, Saccharomyces pastorianus
cgcgcctgcgaagtttccattttcg

SEQ ID NO: 193195 - DNA, 25 bp, Saccharomyces pastorianus
tgcgcgcctgcgaagtttccatttt

SEQ ID NO: 193196 - DNA, 25 bp, Saccharomyces pastorianus
gaagcctattgtctaagcctaaatt

SEQ ID NO: 193197 - DNA, 25 bp, Saccharomyces pastorianus
ttgcgcgcctgcgaagtttccattt

SEQ ID NO: 193198 - DNA, 25 bp, Saccharomyces pastorianus
cctgcgaagtttccattttcggtca

SEQ ID NO: 193199 - DNA, 25 bp, Saccharomyces pastorianus
cgcctgcgaagtttccattttcggt

SEQ ID NO: 193200 - DNA, 25 bp, Saccharomyces pastorianus
gcctgcgaagtttccattttcggtc

SEQ ID NO: 193201 - DNA, 25 bp, Saccharomyces pastorianus
cagattaaagccagccatctccagt

SEQ ID NO: 193202 - DNA, 25 bp, Saccharomyces pastorianus
aaagccagccatctccagtgctcta

SEQ ID NO: 193203 - DNA, 25 bp, Saccharomyces pastorianus
ctggtatttctccagaccaagtgac

SEQ ID NO: 193204 - DNA, 25 bp, Saccharomyces pastorianus
agattaaagccagccatctccagtg

SEQ ID NO: 193205 - DNA, 25 bp, Saccharomyces pastorianus
attaaagccagccatctccagtgct

SEQ ID NO: 193206 - DNA, 25 bp, Saccharomyces pastorianus
actggtatttctccagaccaagtga

SEQ ID NO: 193207 - DNA, 25 bp, Saccharomyces pastorianus
atactacatgttccaagccgcacac

SEQ ID NO: 193208 - DNA, 25 bp, Saccharomyces pastorianus
caatactacatgttccaagccgcac

SEQ ID NO: 193209 - DNA, 25 bp, Saccharomyces pastorianus
tggtatttctccagaccaagtgacc

SEQ ID NO: 193210 - DNA, 25 bp, Saccharomyces pastorianus
tgttccaagccgcacacccaactga

SEQ ID NO: 193211 - DNA, 25 bp, Saccharomyces pastorianus
gactggtatttctccagaccaagtg

SEQ ID NO: 193212 - DNA, 25 bp, Saccharomyces pastorianus
gcctagtgattatacttcccattac

SEQ ID NO: 193213 - DNA, 25 bp, Saccharomyces pastorianus
cattacccagtaatacttatcaaaa

SEQ ID NO: 193214 - DNA, 25 bp, Saccharomyces pastorianus
agtgattatacttcccattacccag

SEQ ID NO: 193215 - DNA, 25 bp, Saccharomyces pastorianus
atagtaagcggtaccttgagataat

SEQ ID NO: 193216 - DNA, 25 bp, Saccharomyces pastorianus
atacttcccattacccagtaatact

SEQ ID NO: 193217 - DNA, 25 bp, Saccharomyces pastorianus
cttcccattacccagtaatacttat

SEQ ID NO: 193218 - DNA, 25 bp, Saccharomyces pastorianus
ttatacttcccattacccagtaata

SEQ ID NO: 193219 - DNA, 25 bp, Saccharomyces pastorianus
atgcctagtgattatacttcccatt

SEQ ID NO: 193220 - DNA, 25 bp, Saccharomyces pastorianus
taagcggtaccttgagataatgtcc

SEQ ID NO: 193221 - DNA, 25 bp, Saccharomyces pastorianus
gattatacttcccattacccagtaa

SEQ ID NO: 193222 - DNA, 25 bp, Saccharomyces pastorianus
gtgattatacttcccattacccagt

SEQ ID NO: 193223 - DNA, 25 bp, Saccharomyces pastorianus
ttccagctgaacaagtcaccagagt

SEQ ID NO: 193224 - DNA, 25 bp, Saccharomyces pastorianus
tattccagctgaacaagtcaccaga

SEQ ID NO: 193225 - DNA, 25 bp, Saccharomyces pastorianus
gttgactggtattccagctgaacaa

SEQ ID NO: 193226 - DNA, 25 bp, Saccharomyces pastorianus
gtattccagctgaacaagtcaccag

SEQ ID NO: 193227 - DNA, 25 bp, Saccharomyces pastorianus
ctggtattccagctgaacaagtcac

SEQ ID NO: 193228 - DNA, 25 bp, Saccharomyces pastorianus
ttgactggtattccagctgaacaag

SEQ ID NO: 193229 - DNA, 25 bp, Saccharomyces pastorianus
tgactggtattccagctgaacaagt

SEQ ID NO: 193230 - DNA, 25 bp, Saccharomyces pastorianus
tggtattccagctgaacaagtcacc

SEQ ID NO: 193231 - DNA, 25 bp, Saccharomyces pastorianus
actggtattccagctgaacaagtca

SEQ ID NO: 193232 - DNA, 25 bp, Saccharomyces pastorianus
ggtattccagctgaacaagtcacca

SEQ ID NO: 193233 - DNA, 25 bp, Saccharomyces pastorianus
attccagctgaacaagtcaccagag

SEQ ID NO: 193234 - DNA, 25 bp, Saccharomyces pastorianus
aacggttcactagaagttggatatg

SEQ ID NO: 193235 - DNA, 25 bp, Saccharomyces pastorianus
agtgcctatagtgaggcaggccaaa

SEQ ID NO: 193236 - DNA, 25 bp, Saccharomyces pastorianus
aatcgatgaagccaacggttcacta

SEQ ID NO: 193237 - DNA, 25 bp, Saccharomyces pastorianus
tacgcattcgtaaaacctttgaaga

SEQ ID NO: 193238 - DNA, 25 bp, Saccharomyces pastorianus
ggatatgttgttttttcaccagaat

SEQ ID NO: 193239 - DNA, 25 bp, Saccharomyces pastorianus
aactgaagctcaatttctgttaatg

SEQ ID NO: 193240 - DNA, 25 bp, Saccharomyces pastorianus
gatagtttaaatgggccgtcaagga

SEQ ID NO: 193241 - DNA, 25 bp, Saccharomyces pastorianus
acgtgccgttggtacattgtgctta

SEQ ID NO: 193242 - DNA, 25 bp, Saccharomyces pastorianus
gcagcgatgcgcttaggctttaagt

SEQ ID NO: 193243 - DNA, 25 bp, Saccharomyces pastorianus
gagaaagacatggttcggaactttt

SEQ ID NO: 193244 - DNA, 25 bp, Saccharomyces pastorianus
aagtatgaaggcacgtttcgacaag

SEQ ID NO: 193245 - DNA, 25 bp, Saccharomyces pastorianus
gtttgcttcgttgaacgttgagcta

SEQ ID NO: 193246 - DNA, 25 bp, Saccharomyces pastorianus
tccggtagtaatgttttttatcatg

SEQ ID NO: 193247 - DNA, 25 bp, Saccharomyces pastorianus
tatcacgtttcttgtttccggtagt

SEQ ID NO: 193248 - DNA, 25 bp, Saccharomyces pastorianus
atatcacgtttcttgtttccggtag

SEQ ID NO: 193249 - DNA, 25 bp, Saccharomyces pastorianus
ctatgtggtttgcttcgttgaacgt

SEQ ID NO: 193250 - DNA, 25 bp, Saccharomyces pastorianus
ttaattgtctacacgtctggaaatg

SEQ ID NO: 193251 - DNA, 25 bp, Saccharomyces pastorianus
ttcgttgaacgttgagctatggcca

SEQ ID NO: 193252 - DNA, 25 bp, Saccharomyces pastorianus
ttttaattgtctacacgtctggaaa

SEQ ID NO: 193253 - DNA, 25 bp, Saccharomyces pastorianus
gttgaacgttgagctatggccatac

SEQ ID NO: 193254 - DNA, 25 bp, Saccharomyces pastorianus
atgtggtttgcttcgttgaacgttg

SEQ ID NO: 193255 - DNA, 25 bp, Saccharomyces pastorianus
cttatatcacgtttcttgtttccgg

SEQ ID NO: 193256 - DNA, 25 bp, Saccharomyces pastorianus
caaaagactgttttaccccaggatg

SEQ ID NO: 193257 - DNA, 25 bp, Saccharomyces pastorianus
atgttttccgaaacgaattgacctg

SEQ ID NO: 193258 - DNA, 25 bp, Saccharomyces pastorianus
aaagcgtagatgtgttatccttcaa

SEQ ID NO: 193259 - DNA, 25 bp, Saccharomyces pastorianus
ccaggatgttttccgaaacgaattg

SEQ ID NO: 193260 - DNA, 25 bp, Saccharomyces pastorianus
gaaaagcgtagatgtgttatccttc

SEQ ID NO: 193261 - DNA, 25 bp, Saccharomyces pastorianus
gatgttttccgaaacgaattgacct

SEQ ID NO: 193262 - DNA, 25 bp, Saccharomyces pastorianus
gtcaaagatgagaaaagcgtagatg

SEQ ID NO: 193263 - DNA, 25 bp, Saccharomyces pastorianus
caggatgttttccgaaacgaattga

SEQ ID NO: 193264 - DNA, 25 bp, Saccharomyces pastorianus
aaaagcgtagatgtgttatccttca

SEQ ID NO: 193265 - DNA, 25 bp, Saccharomyces pastorianus
tgttttccgaaacgaattgacctgg

SEQ ID NO: 193266 - DNA, 25 bp, Saccharomyces pastorianus
tccgaaacgaattgacctggttttg

SEQ ID NO: 193267 - DNA, 25 bp, Saccharomyces pastorianus
tattacttccttggctgtgttgata

SEQ ID NO: 193268 - DNA, 25 bp, Saccharomyces pastorianus
gattggctccattgggttctttatt

SEQ ID NO: 193269 - DNA, 25 bp, Saccharomyces pastorianus
gctccattgggttctttattacttc

SEQ ID NO: 193270 - DNA, 25 bp, Saccharomyces pastorianus
gtttctaattctctctattttattt

SEQ ID NO: 193271 - DNA, 25 bp, Saccharomyces pastorianus
tagattatgaggataagatcgggcc

SEQ ID NO: 193272 - DNA, 25 bp, Saccharomyces pastorianus
tgggttctttattacttccttggct

SEQ ID NO: 193273 - DNA, 25 bp, Saccharomyces pastorianus
cattgggttctttattacttccttg

SEQ ID NO: 193274 - DNA, 25 bp, Saccharomyces pastorianus
gttctttattacttccttggctgtg

SEQ ID NO: 193275 - DNA, 25 bp, Saccharomyces pastorianus
tggctccattgggttctttattact

SEQ ID NO: 193276 - DNA, 25 bp, Saccharomyces pastorianus
tgtgtttctaattctctctatttta

SEQ ID NO: 193277 - DNA, 25 bp, Saccharomyces pastorianus
tggtttatgccaagagagtggtaaa

SEQ ID NO: 193278 - DNA, 25 bp, Saccharomyces pastorianus
cacagggaaattttacaacaggtat

SEQ ID NO: 193279 - DNA, 25 bp, Saccharomyces pastorianus
cgcacagggaaattttacaacaggt

SEQ ID NO: 193280 - DNA, 25 bp, Saccharomyces pastorianus
cctgaagtcatcaagcagcaaagtg

SEQ ID NO: 193281 - DNA, 25 bp, Saccharomyces pastorianus
acacgcacagggaaattttacaaca

SEQ ID NO: 193282 - DNA, 25 bp, Saccharomyces pastorianus
agtcatcaagcagcaaagtgtcaaa

SEQ ID NO: 193283 - DNA, 25 bp, Saccharomyces pastorianus
gtagatatggttagttacggtattt

SEQ ID NO: 193284 - DNA, 25 bp, Saccharomyces pastorianus
aagcagcaaagtgtcaaaaccgcta

SEQ ID NO: 193285 - DNA, 25 bp, Saccharomyces pastorianus
atcaagcagcaaagtgtcaaaaccg

SEQ ID NO: 193286 - DNA, 25 bp, Saccharomyces pastorianus
gaagtcatcaagcagcaaagtgtca

SEQ ID NO: 193287 - DNA, 25 bp, Saccharomyces pastorianus
gatatggttagttacggtatttggg

SEQ ID NO: 193288 - DNA, 25 bp, Saccharomyces pastorianus
gcagcaaagtgtcaaaaccgctatt

SEQ ID NO: 193289 - DNA, 25 bp, Saccharomyces pastorianus
gcctgccatgatcagggcccgtaaa

SEQ ID NO: 193290 - DNA, 25 bp, Saccharomyces pastorianus
gggctctgtttactactacacatat

SEQ ID NO: 193291 - DNA, 25 bp, Saccharomyces pastorianus
tacacatatcattttctgcacaagg

SEQ ID NO: 193292 - DNA, 25 bp, Saccharomyces pastorianus
tctcacgctgctgctgggtgtcacg

SEQ ID NO: 193293 - DNA, 25 bp, Saccharomyces pastorianus
gtgtcacgggctctgtttactacta

SEQ ID NO: 193294 - DNA, 25 bp, Saccharomyces pastorianus
aaaggcaatatgctcggtctcacgc

SEQ ID NO: 193295 - DNA, 25 bp, Saccharomyces pastorianus
gaatccgtccaagtaccaagacacc

SEQ ID NO: 193296 - DNA, 25 bp, Saccharomyces pastorianus
gatgacgcctgccatgatcagggcc

SEQ ID NO: 193297 - DNA, 25 bp, Saccharomyces pastorianus
aatatgctcggtctcacgctgctgc

SEQ ID NO: 193298 - DNA, 25 bp, Saccharomyces pastorianus
atcgatccgcaggagctcgaggctc

SEQ ID NO: 193299 - DNA, 25 bp, Saccharomyces pastorianus
atatcattttctgcacaaggacaac

SEQ ID NO: 193300 - DNA, 25 bp, Saccharomyces pastorianus
taattccgaattagtgggtttccat

SEQ ID NO: 193301 - DNA, 25 bp, Saccharomyces pastorianus
ttccagaactactcttagaactttt

SEQ ID NO: 193302 - DNA, 25 bp, Saccharomyces pastorianus
gatactttatcatgtgtggtctaag

SEQ ID NO: 193303 - DNA, 25 bp, Saccharomyces pastorianus
gtgggtttccatattccagaactac

SEQ ID NO: 193304 - DNA, 25 bp, Saccharomyces pastorianus
gaacttttctttcattcatgtgcag

SEQ ID NO: 193305 - DNA, 25 bp, Saccharomyces pastorianus
catctctaagaaatgtggcgtttta

SEQ ID NO: 193306 - DNA, 25 bp, Saccharomyces pastorianus
gtggtctaagtacacatctctaaga

SEQ ID NO: 193307 - DNA, 25 bp, Saccharomyces pastorianus
gcaaataacccatttaaattggcac

SEQ ID NO: 193308 - DNA, 25 bp, Saccharomyces pastorianus
attggcacaagtgttacctgatact

SEQ ID NO: 193309 - DNA, 25 bp, Saccharomyces pastorianus
ggaatcccaagagagatatgctgaa

SEQ ID NO: 193310 - DNA, 25 bp, Saccharomyces pastorianus
tagggtgggaccaacatgggtttat

SEQ ID NO: 193311 - DNA, 25 bp, Saccharomyces pastorianus
agcagtatctgtattggcaacccct

SEQ ID NO: 193312 - DNA, 25 bp, Saccharomyces pastorianus
agagactcatcttgttgctgcgatt

SEQ ID NO: 193313 - DNA, 25 bp, Saccharomyces pastorianus
gaacagttgcttcatccttcagaga

SEQ ID NO: 193314 - DNA, 25 bp, Saccharomyces pastorianus
aatcctgtattgtgctgtcttcctt

SEQ ID NO: 193315 - DNA, 25 bp, Saccharomyces pastorianus
tagcttattcgcttgcatagtcggc

SEQ ID NO: 193316 - DNA, 25 bp, Saccharomyces pastorianus
tattgttttcattgtctaccgggtt

SEQ ID NO: 193317 - DNA, 25 bp, Saccharomyces pastorianus
acagaactctcggtttcgccaaaga

SEQ ID NO: 193318 - DNA, 25 bp, Saccharomyces pastorianus
actatcctcattatcttggccaaag

SEQ ID NO: 193319 - DNA, 25 bp, Saccharomyces pastorianus
ggagtgtttgcctcattgttcgaaa

SEQ ID NO: 193320 - DNA, 25 bp, Saccharomyces pastorianus
ttctgcatcgcgtgtgttcggaaca

SEQ ID NO: 193321 - DNA, 25 bp, Saccharomyces pastorianus
agcgttgctatcactattgttgtca

SEQ ID NO: 193322 - DNA, 25 bp, Saccharomyces pastorianus
atgaagatgttcttgtttttgaacg

SEQ ID NO: 193323 - DNA, 25 bp, Saccharomyces pastorianus
ttgttttatggcactcatgtgtatt

SEQ ID NO: 193324 - DNA, 25 bp, Saccharomyces pastorianus
gtattgttttatggcactcatgtgt

SEQ ID NO: 193325 - DNA, 25 bp, Saccharomyces pastorianus
attgttttatggcactcatgtgtat

SEQ ID NO: 193326 - DNA, 25 bp, Saccharomyces pastorianus
ggagtattgttttatggcactcatg

SEQ ID NO: 193327 - DNA, 25 bp, Saccharomyces pastorianus
agtattgttttatggcactcatgtg

SEQ ID NO: 193328 - DNA, 25 bp, Saccharomyces pastorianus
tgaagatgttcttgtttttgaacga

SEQ ID NO: 193329 - DNA, 25 bp, Saccharomyces pastorianus
aagatgttcttgtttttgaacgaat

SEQ ID NO: 193330 - DNA, 25 bp, Saccharomyces pastorianus
tgtggagtattgttttatggcactc

SEQ ID NO: 193331 - DNA, 25 bp, Saccharomyces pastorianus
gtggagtattgttttatggcactca

SEQ ID NO: 193332 - DNA, 25 bp, Saccharomyces pastorianus
gaagatgttcttgtttttgaacgaa

SEQ ID NO: 193333 - DNA, 25 bp, Saccharomyces pastorianus
gataaggccaaaattttcaacgaag

SEQ ID NO: 193334 - DNA, 25 bp, Saccharomyces pastorianus
tgacttgcacaagacttttaaagat

SEQ ID NO: 193335 - DNA, 25 bp, Saccharomyces pastorianus
acatgcgccgtaattgtgaggagac

SEQ ID NO: 193336 - DNA, 25 bp, Saccharomyces pastorianus
gggtccgacaatcgataaggccaaa

SEQ ID NO: 193337 - DNA, 25 bp, Saccharomyces pastorianus
acgctgaagattcccatcattgaaa

SEQ ID NO: 193338 - DNA, 25 bp, Saccharomyces pastorianus
ggagctggccataaagatgtaccaa

SEQ ID NO: 193339 - DNA, 25 bp, Saccharomyces pastorianus
catggcgcatgaggacgagttgatc

SEQ ID NO: 193340 - DNA, 25 bp, Saccharomyces pastorianus
gtgaggagacatggcatttttgttt

SEQ ID NO: 193341 - DNA, 25 bp, Saccharomyces pastorianus
taaagattatccagacacatgcgcc

SEQ ID NO: 193342 - DNA, 25 bp, Saccharomyces pastorianus
tatccagacacatgcgccgtaattg

SEQ ID NO: 193343 - DNA, 25 bp, Saccharomyces pastorianus
tttttgatacgctgaagattcccat

SEQ ID NO: 193344 - DNA, 25 bp, Saccharomyces pastorianus
atctaagttacctgatacaagaact

SEQ ID NO: 193345 - DNA, 25 bp, Saccharomyces pastorianus
aaataatctaagttacctgatacaa

SEQ ID NO: 193346 - DNA, 25 bp, Saccharomyces pastorianus
ttattaaataatctaagttacctga

SEQ ID NO: 193347 - DNA, 25 bp, Saccharomyces pastorianus
taatctaagttacctgatacaagaa

SEQ ID NO: 193348 - DNA, 25 bp, Saccharomyces pastorianus
ataatctaagttacctgatacaaga

SEQ ID NO: 193349 - DNA, 25 bp, Saccharomyces pastorianus
tattaaataatctaagttacctgat

SEQ ID NO: 193350 - DNA, 25 bp, Saccharomyces pastorianus
aataatctaagttacctgatacaag

SEQ ID NO: 193351 - DNA, 25 bp, Saccharomyces pastorianus
ttaaataatctaagttacctgatac

SEQ ID NO: 193352 - DNA, 25 bp, Saccharomyces pastorianus
attaaataatctaagttacctgata

SEQ ID NO: 193353 - DNA, 25 bp, Saccharomyces pastorianus
taaataatctaagttacctgataca

SEQ ID NO: 193354 - DNA, 25 bp, Saccharomyces pastorianus
aatctaagttacctgatacaagaac

SEQ ID NO: 193355 - DNA, 25 bp, Saccharomyces pastorianus
gaatagaatatgtcaataggctcat

SEQ ID NO: 193356 - DNA, 25 bp, Saccharomyces pastorianus
gaaaaatcccgatgacgaagttata

SEQ ID NO: 193357 - DNA, 25 bp, Saccharomyces pastorianus
gaatatgtcaataggctcatagaag

SEQ ID NO: 193358 - DNA, 25 bp, Saccharomyces pastorianus
aatcccgatgacgaagttatagaac

SEQ ID NO: 193359 - DNA, 25 bp, Saccharomyces pastorianus
tcccgatgacgaagttatagaacaa

SEQ ID NO: 193360 - DNA, 25 bp, Saccharomyces pastorianus
atgtcaataggctcatagaagagaa

SEQ ID NO: 193361 - DNA, 25 bp, Saccharomyces pastorianus
gagaaaaatcccgatgacgaagtta

SEQ ID NO: 193362 - DNA, 25 bp, Saccharomyces pastorianus
tattatagaagaggtaacagttact

SEQ ID NO: 193363 - DNA, 25 bp, Saccharomyces pastorianus
gagactagacgaagctttacaagat

SEQ ID NO: 193364 - DNA, 25 bp, Saccharomyces pastorianus
caagcaaaggcttattatagaagag

SEQ ID NO: 193365 - DNA, 25 bp, Saccharomyces pastorianus
tgtaaagagaaaaatcccgatgacg

SEQ ID NO: 193366 - DNA, 25 bp, Saccharomyces pastorianus
cgttgtgttgatgactcggtgattc

SEQ ID NO: 193367 - DNA, 25 bp, Saccharomyces pastorianus
tcaaatcgggcgcacgttacgtaaa

SEQ ID NO: 193368 - DNA, 25 bp, Saccharomyces pastorianus
aaatctgctaggtcaaatcgggcgc

SEQ ID NO: 193369 - DNA, 25 bp, Saccharomyces pastorianus
acgacgaatttcacagtctctgtat

SEQ ID NO: 193370 - DNA, 25 bp, Saccharomyces pastorianus
gatcagatcactacagattcactgt

SEQ ID NO: 193371 - DNA, 25 bp, Saccharomyces pastorianus
gattcactgtcgtactttttcagca

SEQ ID NO: 193372 - DNA, 25 bp, Saccharomyces pastorianus
gtctgactgcattcattcctgagaa

SEQ ID NO: 193373 - DNA, 25 bp, Saccharomyces pastorianus
aactaaggaggcatttgtggcgtta

SEQ ID NO: 193374 - DNA, 25 bp, Saccharomyces pastorianus
atctgacgtatcttgatcttggttt

SEQ ID NO: 193375 - DNA, 25 bp, Saccharomyces pastorianus
gctttattaccgcagtacctagtca

SEQ ID NO: 193376 - DNA, 25 bp, Saccharomyces pastorianus
gttagcctgtcctaatctgacgtat

SEQ ID NO: 193377 - DNA, 25 bp, Saccharomyces pastorianus
caatgaggacacttaacggtacaac

SEQ ID NO: 193378 - DNA, 25 bp, Saccharomyces pastorianus
ttagcctcatggtttataccccgag

SEQ ID NO: 193379 - DNA, 25 bp, Saccharomyces pastorianus
gaaagtacggtcaatagcaagagaa

SEQ ID NO: 193380 - DNA, 25 bp, Saccharomyces pastorianus
gaaactccagaaataagctctactt

SEQ ID NO: 193381 - DNA, 25 bp, Saccharomyces pastorianus
gatgagaccattatcagtgttgatg

SEQ ID NO: 193382 - DNA, 25 bp, Saccharomyces pastorianus
ctccgtaaataccattcaatgagga

SEQ ID NO: 193383 - DNA, 25 bp, Saccharomyces pastorianus
aattttaccacgaggagaacaggtg

SEQ ID NO: 193384 - DNA, 25 bp, Saccharomyces pastorianus
agctctactttccatttgagttcaa

SEQ ID NO: 193385 - DNA, 25 bp, Saccharomyces pastorianus
gtttataccccgagatgagaccatt

SEQ ID NO: 193386 - DNA, 25 bp, Saccharomyces pastorianus
ggtggtgtaaaaagttagcctcatg

SEQ ID NO: 193387 - DNA, 25 bp, Saccharomyces pastorianus
ttaacggtacaacagaaactccaga

SEQ ID NO: 193388 - DNA, 25 bp, Saccharomyces pastorianus
tgaaagcgtacttcagggagcctga

SEQ ID NO: 193389 - DNA, 25 bp, Saccharomyces pastorianus
ctcgaatctcagacttttgacgatt

SEQ ID NO: 193390 - DNA, 25 bp, Saccharomyces pastorianus
aacagtagtagacctagaccacctc

SEQ ID NO: 193391 - DNA, 25 bp, Saccharomyces pastorianus
gtcaggatgtatgtgggcccattcc

SEQ ID NO: 193392 - DNA, 25 bp, Saccharomyces pastorianus
cagggagcctgatcttccgaggaag

SEQ ID NO: 193393 - DNA, 25 bp, Saccharomyces pastorianus
tagaccacctcctttacagacaaaa

SEQ ID NO: 193394 - DNA, 25 bp, Saccharomyces pastorianus
aatcgttcgttgacaatggcaatcc

SEQ ID NO: 193395 - DNA, 25 bp, Saccharomyces pastorianus
acaaaatacactctgctggacaatt

SEQ ID NO: 193396 - DNA, 25 bp, Saccharomyces pastorianus
gtttcacgggccattagattctatg

SEQ ID NO: 193397 - DNA, 25 bp, Saccharomyces pastorianus
gattctctgcgattctagattcacc

SEQ ID NO: 193398 - DNA, 25 bp, Saccharomyces pastorianus
acaatataccactagattctctgcg

SEQ ID NO: 193399 - DNA, 25 bp, Saccharomyces pastorianus
gtaggtccaccacaactcaatatga

SEQ ID NO: 193400 - DNA, 25 bp, Saccharomyces pastorianus
catcgaatcagttataaggcaagtt

SEQ ID NO: 193401 - DNA, 25 bp, Saccharomyces pastorianus
gggcaatctcactgtaggtccacca

SEQ ID NO: 193402 - DNA, 25 bp, Saccharomyces pastorianus
tggttcatcattgagaagacaagtt

SEQ ID NO: 193403 - DNA, 25 bp, Saccharomyces pastorianus
gggttgataaaccacgaaatatcgc

SEQ ID NO: 193404 - DNA, 25 bp, Saccharomyces pastorianus
ggagatgcgtggtagatttgaatta

SEQ ID NO: 193405 - DNA, 25 bp, Saccharomyces pastorianus
agaaggtcggtatcacaggtaaata

SEQ ID NO: 193406 - DNA, 25 bp, Saccharomyces pastorianus
agccaggatagatggtagcgcattt

SEQ ID NO: 193407 - DNA, 25 bp, Saccharomyces pastorianus
actcaatatgactacatcgaatcag

SEQ ID NO: 193408 - DNA, 25 bp, Saccharomyces pastorianus
cacgaaatatcgcagttgaggagaa

SEQ ID NO: 193409 - DNA, 25 bp, Saccharomyces pastorianus
ggatgactaaatgttcttatattgg

SEQ ID NO: 193410 - DNA, 25 bp, Saccharomyces pastorianus
attgtcaaggactctccagttgaaa

SEQ ID NO: 193411 - DNA, 25 bp, Saccharomyces pastorianus
gctcaaagaattgtcaaggactctc

SEQ ID NO: 193412 - DNA, 25 bp, Saccharomyces pastorianus
gactctccagttgaaaagactgtca

SEQ ID NO: 193413 - DNA, 25 bp, Saccharomyces pastorianus
atatccagtcaaacctttggactct

SEQ ID NO: 193414 - DNA, 25 bp, Saccharomyces pastorianus
tgtcctccaagggtaccagcacata

SEQ ID NO: 193415 - DNA, 25 bp, Saccharomyces pastorianus
tcctccaagggtaccagcacatatc

SEQ ID NO: 193416 - DNA, 25 bp, Saccharomyces pastorianus
caaggactctccagttgaaaagact

SEQ ID NO: 193417 - DNA, 25 bp, Saccharomyces pastorianus
tgtcaaggactctccagttgaaaag

SEQ ID NO: 193418 - DNA, 25 bp, Saccharomyces pastorianus
gcacatatccagtcaaacctttgga

SEQ ID NO: 193419 - DNA, 25 bp, Saccharomyces pastorianus
cagcacatatccagtcaaacctttg

SEQ ID NO: 193420 - DNA, 25 bp, Saccharomyces pastorianus
gaattgtcaaggactctccagttga

SEQ ID NO: 193421 - DNA, 25 bp, Saccharomyces pastorianus
gatccgttagtgctgacattcgcaa

SEQ ID NO: 193422 - DNA, 25 bp, Saccharomyces pastorianus
gaaattcaatttcgtaagggctatt

SEQ ID NO: 193423 - DNA, 25 bp, Saccharomyces pastorianus
aagaggctttgatccgttagtgctg

SEQ ID NO: 193424 - DNA, 25 bp, Saccharomyces pastorianus
tgattatattcctatggttccacca

SEQ ID NO: 193425 - DNA, 25 bp, Saccharomyces pastorianus
ccattctatcatccggctggtttag

SEQ ID NO: 193426 - DNA, 25 bp, Saccharomyces pastorianus
tccggctggtttagagatgtttatt

SEQ ID NO: 193427 - DNA, 25 bp, Saccharomyces pastorianus
agggctattttagggttgtgcatac

SEQ ID NO: 193428 - DNA, 25 bp, Saccharomyces pastorianus
ttgtgcatacaggtgattatattcc

SEQ ID NO: 193429 - DNA, 25 bp, Saccharomyces pastorianus
gcggaagatattgaataccgtggta

SEQ ID NO: 193430 - DNA, 25 bp, Saccharomyces pastorianus
tatggttccaccattctatcatccg

SEQ ID NO: 193431 - DNA, 25 bp, Saccharomyces pastorianus
agttggtctacctcagaatgcggaa

SEQ ID NO: 193432 - DNA, 25 bp, Saccharomyces pastorianus
agtgtctgggactacttcagatcta

SEQ ID NO: 193433 - DNA, 25 bp, Saccharomyces pastorianus
agactgtgtataccaacttttgacg

SEQ ID NO: 193434 - DNA, 25 bp, Saccharomyces pastorianus
gtttaccacttgtattcatgccaat

SEQ ID NO: 193435 - DNA, 25 bp, Saccharomyces pastorianus
ttttgacgcaaaacccagatctatt

SEQ ID NO: 193436 - DNA, 25 bp, Saccharomyces pastorianus
aagtggagtggatttcgccggatct

SEQ ID NO: 193437 - DNA, 25 bp, Saccharomyces pastorianus
tcgtctccccagttttccaacaatt

SEQ ID NO: 193438 - DNA, 25 bp, Saccharomyces pastorianus
gaattacgccataaacgagactcag

SEQ ID NO: 193439 - DNA, 25 bp, Saccharomyces pastorianus
aagcggcatgaatgagcacgatcaa

SEQ ID NO: 193440 - DNA, 25 bp, Saccharomyces pastorianus
gagcatagtaattccgatggcggta

SEQ ID NO: 193441 - DNA, 25 bp, Saccharomyces pastorianus
gaacattcctttccaatagcgagaa

SEQ ID NO: 193442 - DNA, 25 bp, Saccharomyces pastorianus
gactcagtacccatatcggtggata

SEQ ID NO: 193443 - DNA, 25 bp, Saccharomyces pastorianus
acagaacggcttacggcattggaat

SEQ ID NO: 193444 - DNA, 25 bp, Saccharomyces pastorianus
acactggtccatgtatatggccctt

SEQ ID NO: 193445 - DNA, 25 bp, Saccharomyces pastorianus
ttcttaaaacaggacctctggccgg

SEQ ID NO: 193446 - DNA, 25 bp, Saccharomyces pastorianus
tatacaacaaagtctcaacccgcgt

SEQ ID NO: 193447 - DNA, 25 bp, Saccharomyces pastorianus
gcgatcaatggcctgactatgctaa

SEQ ID NO: 193448 - DNA, 25 bp, Saccharomyces pastorianus
tcccctttcggaaacctctatgaga

SEQ ID NO: 193449 - DNA, 25 bp, Saccharomyces pastorianus
aaactcttcgtacccagacttatgg

SEQ ID NO: 193450 - DNA, 25 bp, Saccharomyces pastorianus
tggccggccttccaagagcgatcaa

SEQ ID NO: 193451 - DNA, 25 bp, Saccharomyces pastorianus
atatggccctttgtttgcctttgat

SEQ ID NO: 193452 - DNA, 25 bp, Saccharomyces pastorianus
gataattgcttctttggttccacaa

SEQ ID NO: 193453 - DNA, 25 bp, Saccharomyces pastorianus
tagtaccgcacttagacccaataga

SEQ ID NO: 193454 - DNA, 25 bp, Saccharomyces pastorianus
cgctatgtccctttttcaactggaa

SEQ ID NO: 193455 - DNA, 25 bp, Saccharomyces pastorianus
gtcaaatgcaattccgctatgtccc

SEQ ID NO: 193456 - DNA, 25 bp, Saccharomyces pastorianus
gtccctttttcaactggaaagcaag

SEQ ID NO: 193457 - DNA, 25 bp, Saccharomyces pastorianus
aatgcaattccgctatgtccctttt

SEQ ID NO: 193458 - DNA, 25 bp, Saccharomyces pastorianus
tcttcagggtactttccttggtcga

SEQ ID NO: 193459 - DNA, 25 bp, Saccharomyces pastorianus
gatatttcttcagggtactttcctt

SEQ ID NO: 193460 - DNA, 25 bp, Saccharomyces pastorianus
gaaagcaagttttaacccggatgat

SEQ ID NO: 193461 - DNA, 25 bp, Saccharomyces pastorianus
aacgctgtcaaatgcaattccgcta

SEQ ID NO: 193462 - DNA, 25 bp, Saccharomyces pastorianus
atgcccaagcaaacgctgtcaaatg

SEQ ID NO: 193463 - DNA, 25 bp, Saccharomyces pastorianus
ttaacccggatgatatttcttcagg

SEQ ID NO: 193464 - DNA, 25 bp, Saccharomyces pastorianus
tccttggtcgaaaacttggttcagt

SEQ ID NO: 193465 - DNA, 25 bp, Saccharomyces pastorianus
tcgaccatccccaaagcgattaaag

SEQ ID NO: 193466 - DNA, 25 bp, Saccharomyces pastorianus
taaagtcagttgctctgcgggtgcc

SEQ ID NO: 193467 - DNA, 25 bp, Saccharomyces pastorianus
accagaaccggattgtctatcactc

SEQ ID NO: 193468 - DNA, 25 bp, Saccharomyces pastorianus
taccagcaaagtcatctcaccaatt

SEQ ID NO: 193469 - DNA, 25 bp, Saccharomyces pastorianus
acatgctctggtggtgtttgctcga

SEQ ID NO: 193470 - DNA, 25 bp, Saccharomyces pastorianus
tactgtgaccaactgctcaggtgga

SEQ ID NO: 193471 - DNA, 25 bp, Saccharomyces pastorianus
attgctcattcatctgcttcttata

SEQ ID NO: 193472 - DNA, 25 bp, Saccharomyces pastorianus
gatgtctccggttagtagtttcaac

SEQ ID NO: 193473 - DNA, 25 bp, Saccharomyces pastorianus
gaagatgtcgcctctactaaaaccg

SEQ ID NO: 193474 - DNA, 25 bp, Saccharomyces pastorianus
acctgtaccatgttaactgcaccaa

SEQ ID NO: 193475 - DNA, 25 bp, Saccharomyces pastorianus
accaacggtgcctataatttcgata

SEQ ID NO: 193476 - DNA, 25 bp, Saccharomyces pastorianus
tatcagtgcgaattcctcgggatat

SEQ ID NO: 193477 - DNA, 25 bp, Saccharomyces pastorianus
aggtcgctatggtcgtatgttatgc

SEQ ID NO: 193478 - DNA, 25 bp, Saccharomyces pastorianus
atagctgccgagagagggttccctg

SEQ ID NO: 193479 - DNA, 25 bp, Saccharomyces pastorianus
ggcaggaccacaaacctttattgct

SEQ ID NO: 193480 - DNA, 25 bp, Saccharomyces pastorianus
ttgcgtactttccaatatcagtgcg

SEQ ID NO: 193481 - DNA, 25 bp, Saccharomyces pastorianus
gtccactttttggtattctagcagt

SEQ ID NO: 193482 - DNA, 25 bp, Saccharomyces pastorianus
gcccgtctcatttatttgcgtactt

SEQ ID NO: 193483 - DNA, 25 bp, Saccharomyces pastorianus
aagactggctggtgcttacctgtgg

SEQ ID NO: 193484 - DNA, 25 bp, Saccharomyces pastorianus
tgggctatttttgcagctgtcttag

SEQ ID NO: 193485 - DNA, 25 bp, Saccharomyces pastorianus
atcgtgcttctatctatactgctca

SEQ ID NO: 193486 - DNA, 25 bp, Saccharomyces pastorianus
aggctcctaaatatcatggcgctaa

SEQ ID NO: 193487 - DNA, 25 bp, Saccharomyces pastorianus
tactggaactgctacaggtggcgtt

SEQ ID NO: 193488 - DNA, 25 bp, Saccharomyces pastorianus
actgtattgctgtgaattccggttc

SEQ ID NO: 193489 - DNA, 25 bp, Saccharomyces pastorianus
gaacaactactgctacaatggccat

SEQ ID NO: 193490 - DNA, 25 bp, Saccharomyces pastorianus
gtgcgacaggcacagtcactaatgt

SEQ ID NO: 193491 - DNA, 25 bp, Saccharomyces pastorianus
gttggtggccgttctgataatacag

SEQ ID NO: 193492 - DNA, 25 bp, Saccharomyces pastorianus
taccggtggttcttcctattctgga

SEQ ID NO: 193493 - DNA, 25 bp, Saccharomyces pastorianus
cggtgattcggctggtggtcataat

SEQ ID NO: 193494 - DNA, 25 bp, Saccharomyces pastorianus
aacgctactaactggcaatggtctg

SEQ ID NO: 193495 - DNA, 25 bp, Saccharomyces pastorianus
gttcagatttaaccatcagcgacat

SEQ ID NO: 193496 - DNA, 25 bp, Saccharomyces pastorianus
tacagtcaatggtttctgggctgaa

SEQ ID NO: 193497 - DNA, 25 bp, Saccharomyces pastorianus
gtggcgttcccatttcgaatttagt

SEQ ID NO: 193498 - DNA, 25 bp, Saccharomyces pastorianus
gggtccgcacgattcctgtgggaac

SEQ ID NO: 193499 - DNA, 25 bp, Saccharomyces pastorianus
gtttaccattggaagccttgcaact

SEQ ID NO: 193500 - DNA, 25 bp, Saccharomyces pastorianus
acgacccatcaagcatgtgaacgtt

SEQ ID NO: 193501 - DNA, 25 bp, Saccharomyces pastorianus
agccagtgcaaatcgtacgtcacaa

SEQ ID NO: 193502 - DNA, 25 bp, Saccharomyces pastorianus
ccagggctaccaccgagaagatatt

SEQ ID NO: 193503 - DNA, 25 bp, Saccharomyces pastorianus
gagtccaggacatcttatcagttct

SEQ ID NO: 193504 - DNA, 25 bp, Saccharomyces pastorianus
ggagacgcagttctattcttaggga

SEQ ID NO: 193505 - DNA, 25 bp, Saccharomyces pastorianus
tatagtctacaaggttggcgctggt

SEQ ID NO: 193506 - DNA, 25 bp, Saccharomyces pastorianus
agatattgttcatcatacgacccat

SEQ ID NO: 193507 - DNA, 25 bp, Saccharomyces pastorianus
ttcttagggagcctctaccatgcag

SEQ ID NO: 193508 - DNA, 25 bp, Saccharomyces pastorianus
gtgatattcaactgaactccggtat

SEQ ID NO: 193509 - DNA, 25 bp, Saccharomyces pastorianus
gcgaaacatgttttcccattagtgg

SEQ ID NO: 193510 - DNA, 25 bp, Saccharomyces pastorianus
ttccttttgatgtcggatttcccac

SEQ ID NO: 193511 - DNA, 25 bp, Saccharomyces pastorianus
gtacttcggaacagacggatatgga

SEQ ID NO: 193512 - DNA, 25 bp, Saccharomyces pastorianus
gcagcagggcaaagtactctatcta

SEQ ID NO: 193513 - DNA, 25 bp, Saccharomyces pastorianus
gccatagcttatgttcggtctaaag

SEQ ID NO: 193514 - DNA, 25 bp, Saccharomyces pastorianus
ccaagaaaccttcatttctcaccga

SEQ ID NO: 193515 - DNA, 25 bp, Saccharomyces pastorianus
gatgacccagctgttaccaagaaac

SEQ ID NO: 193516 - DNA, 25 bp, Saccharomyces pastorianus
aagtactctatctaggtgtgtctga

SEQ ID NO: 193517 - DNA, 25 bp, Saccharomyces pastorianus
gtcggatttcccactaattttattg

SEQ ID NO: 193518 - DNA, 25 bp, Saccharomyces pastorianus
gagaaggcttgcgtaccttttttgg

SEQ ID NO: 193519 - DNA, 25 bp, Saccharomyces pastorianus
tgtcactgctattgccatagcttat

SEQ ID NO: 193520 - DNA, 25 bp, Saccharomyces pastorianus
ttatgccaatattacaaaaaaatca

SEQ ID NO: 193521 - DNA, 25 bp, Saccharomyces pastorianus
tatacacttatgccaatattacaaa

SEQ ID NO: 193522 - DNA, 25 bp, Saccharomyces pastorianus
aactcccacgattatccacatttta

SEQ ID NO: 193523 - DNA, 25 bp, Saccharomyces pastorianus
atacacttatgccaatattacaaaa

SEQ ID NO: 193524 - DNA, 25 bp, Saccharomyces pastorianus
tgccaatattacaaaaaaatcacca

SEQ ID NO: 193525 - DNA, 25 bp, Saccharomyces pastorianus
tacacttatgccaatattacaaaaa

SEQ ID NO: 193526 - DNA, 25 bp, Saccharomyces pastorianus
cttatgccaatattacaaaaaaatc

SEQ ID NO: 193527 - DNA, 25 bp, Saccharomyces pastorianus
taactcccacgattatccacatttt

SEQ ID NO: 193528 - DNA, 25 bp, Saccharomyces pastorianus
ataactcccacgattatccacattt

SEQ ID NO: 193529 - DNA, 25 bp, Saccharomyces pastorianus
atgccaatattacaaaaaaatcacc

SEQ ID NO: 193530 - DNA, 25 bp, Saccharomyces pastorianus
tatgccaatattacaaaaaaatcac

SEQ ID NO: 193531 - DNA, 25 bp, Saccharomyces pastorianus
tatcgtcgtcatacgatgaatccgt

SEQ ID NO: 193532 - DNA, 25 bp, Saccharomyces pastorianus
acgatgaatccgttaggctttggga

SEQ ID NO: 193533 - DNA, 25 bp, Saccharomyces pastorianus
acgtttctatcgtcgtcatacgatg

SEQ ID NO: 193534 - DNA, 25 bp, Saccharomyces pastorianus
gaacgatacgtttctatcgtcgtca

SEQ ID NO: 193535 - DNA, 25 bp, Saccharomyces pastorianus
tgaaccccgtgaacgatacgtttct

SEQ ID NO: 193536 - DNA, 25 bp, Saccharomyces pastorianus
cgtcgtcatacgatgaatccgttag

SEQ ID NO: 193537 - DNA, 25 bp, Saccharomyces pastorianus
gtttctatcgtcgtcatacgatgaa

SEQ ID NO: 193538 - DNA, 25 bp, Saccharomyces pastorianus
gtcatacgatgaatccgttaggctt

SEQ ID NO: 193539 - DNA, 25 bp, Saccharomyces pastorianus
atccgttaggctttgggatttgaag

SEQ ID NO: 193540 - DNA, 25 bp, Saccharomyces pastorianus
ccccgtgaacgatacgtttctatcg

SEQ ID NO: 193541 - DNA, 25 bp, Saccharomyces pastorianus
gatacgtttctatcgtcgtcatacg

SEQ ID NO: 193542 - DNA, 25 bp, Saccharomyces pastorianus
tcatcttcagatgagattgctttgg

SEQ ID NO: 193543 - DNA, 25 bp, Saccharomyces pastorianus
taccaaaaactactaagactagcat

SEQ ID NO: 193544 - DNA, 25 bp, Saccharomyces pastorianus
ggaacagaatgctaactcgtttaaa

SEQ ID NO: 193545 - DNA, 25 bp, Saccharomyces pastorianus
gagcctgacggatctttatggaaca

SEQ ID NO: 193546 - DNA, 25 bp, Saccharomyces pastorianus
gtgattgtgaatcatcttcagatga

SEQ ID NO: 193547 - DNA, 25 bp, Saccharomyces pastorianus
ctagattcggattcaggttatgaca

SEQ ID NO: 193548 - DNA, 25 bp, Saccharomyces pastorianus
tggagttctttaacacccacaaaat

SEQ ID NO: 193549 - DNA, 25 bp, Saccharomyces pastorianus
acccacaaaatcaaggacttctctt

SEQ ID NO: 193550 - DNA, 25 bp, Saccharomyces pastorianus
gattgctttggagttctttaacacc

SEQ ID NO: 193551 - DNA, 25 bp, Saccharomyces pastorianus
agactagcatagagcctgacggatc

SEQ ID NO: 193552 - DNA, 25 bp, Saccharomyces pastorianus
aaggacttctcttcaaagccaaatg

SEQ ID NO: 193553 - DNA, 25 bp, Saccharomyces pastorianus
gttctattgtgtgtttctcaccacc

SEQ ID NO: 193554 - DNA, 25 bp, Saccharomyces pastorianus
aagcagtcgctctcgttctattgtg

SEQ ID NO: 193555 - DNA, 25 bp, Saccharomyces pastorianus
ttatgacgttttcgagtgcgaggat

SEQ ID NO: 193556 - DNA, 25 bp, Saccharomyces pastorianus
gaaggcggccatactcattaaaaac

SEQ ID NO: 193557 - DNA, 25 bp, Saccharomyces pastorianus
ttttcgagtgcgaggatgtcagaaa

SEQ ID NO: 193558 - DNA, 25 bp, Saccharomyces pastorianus
ggaagaactctacagctcgaacaat

SEQ ID NO: 193559 - DNA, 25 bp, Saccharomyces pastorianus
gtaattatgacgttttcgagtgcga

SEQ ID NO: 193560 - DNA, 25 bp, Saccharomyces pastorianus
ttccctctttcgtttgcaaaagaag

SEQ ID NO: 193561 - DNA, 25 bp, Saccharomyces pastorianus
tatggatgcatctctctgcatataa

SEQ ID NO: 193562 - DNA, 25 bp, Saccharomyces pastorianus
gacgttttcgagtgcgaggatgtca

SEQ ID NO: 193563 - DNA, 25 bp, Saccharomyces pastorianus
aattatgacgttttcgagtgcgagg

SEQ ID NO: 193564 - DNA, 25 bp, Saccharomyces pastorianus
acaagagctcttctggtttctacgc

SEQ ID NO: 193565 - DNA, 25 bp, Saccharomyces pastorianus
tgctgccactggtttttctattaaa

SEQ ID NO: 193566 - DNA, 25 bp, Saccharomyces pastorianus
gacgctaccggtgttgcgattagac

SEQ ID NO: 193567 - DNA, 25 bp, Saccharomyces pastorianus
tgtcgagacctctactactgtggaa

SEQ ID NO: 193568 - DNA, 25 bp, Saccharomyces pastorianus
gtttctacgctatcaaggacgggtc

SEQ ID NO: 193569 - DNA, 25 bp, Saccharomyces pastorianus
agatttttctccaagcgactctagt

SEQ ID NO: 193570 - DNA, 25 bp, Saccharomyces pastorianus
ttccggctcggatttacaatacttg

SEQ ID NO: 193571 - DNA, 25 bp, Saccharomyces pastorianus
ggtcgtcttacattttctcttctaa

SEQ ID NO: 193572 - DNA, 25 bp, Saccharomyces pastorianus
ttgaggcaactattaccgatgacgg

SEQ ID NO: 193573 - DNA, 25 bp, Saccharomyces pastorianus
ggcactttgaaacttggcagcggta

SEQ ID NO: 193574 - DNA, 25 bp, Saccharomyces pastorianus
aaggttctgagagcgatgctgccac

SEQ ID NO: 193575 - DNA, 25 bp, Saccharomyces pastorianus
ttccagctgaacaagtcaccagagt

SEQ ID NO: 193576 - DNA, 25 bp, Saccharomyces pastorianus
tattccagctgaacaagtcaccaga

SEQ ID NO: 193577 - DNA, 25 bp, Saccharomyces pastorianus
gttgactggtattccagctgaacaa

SEQ ID NO: 193578 - DNA, 25 bp, Saccharomyces pastorianus
gtattccagctgaacaagtcaccag

SEQ ID NO: 193579 - DNA, 25 bp, Saccharomyces pastorianus
ctggtattccagctgaacaagtcac

SEQ ID NO: 193580 - DNA, 25 bp, Saccharomyces pastorianus
ttgactggtattccagctgaacaag

SEQ ID NO: 193581 - DNA, 25 bp, Saccharomyces pastorianus
tgactggtattccagctgaacaagt

SEQ ID NO: 193582 - DNA, 25 bp, Saccharomyces pastorianus
tggtattccagctgaacaagtcacc

SEQ ID NO: 193583 - DNA, 25 bp, Saccharomyces pastorianus
actggtattccagctgaacaagtca

SEQ ID NO: 193584 - DNA, 25 bp, Saccharomyces pastorianus
ggtattccagctgaacaagtcacca

SEQ ID NO: 193585 - DNA, 25 bp, Saccharomyces pastorianus
attccagctgaacaagtcaccagag

SEQ ID NO: 193586 - DNA, 25 bp, Saccharomyces pastorianus
gcatacattataccacttttactcc

SEQ ID NO: 193587 - DNA, 25 bp, Saccharomyces pastorianus
aatatacccacaaaatcaccactaa

SEQ ID NO: 193588 - DNA, 25 bp, Saccharomyces pastorianus
atgcatacattataccacttttact

SEQ ID NO: 193589 - DNA, 25 bp, Saccharomyces pastorianus
tgcatacattataccacttttactc

SEQ ID NO: 193590 - DNA, 25 bp, Saccharomyces pastorianus
tactccatatactaaccattcaatt

SEQ ID NO: 193591 - DNA, 25 bp, Saccharomyces pastorianus
atatacccacaaaatcaccactaaa

SEQ ID NO: 193592 - DNA, 25 bp, Saccharomyces pastorianus
gtgcaatttacccataaaacccacg

SEQ ID NO: 193593 - DNA, 25 bp, Saccharomyces pastorianus
tgcaatttacccataaaacccacga

SEQ ID NO: 193594 - DNA, 25 bp, Saccharomyces pastorianus
acattataccacttttactccatat

SEQ ID NO: 193595 - DNA, 25 bp, Saccharomyces pastorianus
caatatacccacaaaatcaccacta

SEQ ID NO: 193596 - DNA, 25 bp, Saccharomyces pastorianus
tatacacacttatttcaatataccc

SEQ ID NO: 193597 - DNA, 25 bp, Saccharomyces pastorianus
cgaactataccttgtaccactacag

SEQ ID NO: 193598 - DNA, 25 bp, Saccharomyces pastorianus
cgacgtctatgtttccaaaacatta

SEQ ID NO: 193599 - DNA, 25 bp, Saccharomyces pastorianus
atgatgggctgtttcgaggaacgat

SEQ ID NO: 193600 - DNA, 25 bp, Saccharomyces pastorianus
agatgcggccagtagtgagacttta

SEQ ID NO: 193601 - DNA, 25 bp, Saccharomyces pastorianus
agcttggtggacatgttgcgtgaca

SEQ ID NO: 193602 - DNA, 25 bp, Saccharomyces pastorianus
gtctggccattttctacacgaacta

SEQ ID NO: 193603 - DNA, 25 bp, Saccharomyces pastorianus
gtcgttagagtctggccattttcta

SEQ ID NO: 193604 - DNA, 25 bp, Saccharomyces pastorianus
gttgcgtgacagtcacagcaactgg

SEQ ID NO: 193605 - DNA, 25 bp, Saccharomyces pastorianus
actacagtggcagcttggtggacat

SEQ ID NO: 193606 - DNA, 25 bp, Saccharomyces pastorianus
taaagcgacagatgcagatgcggcc

SEQ ID NO: 193607 - DNA, 25 bp, Saccharomyces pastorianus
gaatggtattgttttatgatgggct

SEQ ID NO: 193608 - DNA, 25 bp, Saccharomyces pastorianus
gtaaccacaactttaacatcttcaa

SEQ ID NO: 193609 - DNA, 25 bp, Saccharomyces pastorianus
aactactaccgctagtccaactact

SEQ ID NO: 193610 - DNA, 25 bp, Saccharomyces pastorianus
ggatgatgtaaccacaactttaaca

SEQ ID NO: 193611 - DNA, 25 bp, Saccharomyces pastorianus
taacatcttcaacacaacctaccag

SEQ ID NO: 193612 - DNA, 25 bp, Saccharomyces pastorianus
aacctccgcaagtgccacacaggat

SEQ ID NO: 193613 - DNA, 25 bp, Saccharomyces pastorianus
ctttaacatcttcaacacaacctac

SEQ ID NO: 193614 - DNA, 25 bp, Saccharomyces pastorianus
actaccgctagtccaactactactg

SEQ ID NO: 193615 - DNA, 25 bp, Saccharomyces pastorianus
tccgcaagtgccacacaggatgatg

SEQ ID NO: 193616 - DNA, 25 bp, Saccharomyces pastorianus
tcaagctccgatttctcaacgtcaa

SEQ ID NO: 193617 - DNA, 25 bp, Saccharomyces pastorianus
aagcactcaatcctcaagctccgat

SEQ ID NO: 193618 - DNA, 25 bp, Saccharomyces pastorianus
gtgccacacaggatgatgtaaccac

SEQ ID NO: 193619 - DNA, 25 bp, Saccharomyces pastorianus
gttgataaccaaatgctcttagcca

SEQ ID NO: 193620 - DNA, 25 bp, Saccharomyces pastorianus
gaacatgaagtttcagccaagcttg

SEQ ID NO: 193621 - DNA, 25 bp, Saccharomyces pastorianus
tgttgaatgagggacgaaccgtatt

SEQ ID NO: 193622 - DNA, 25 bp, Saccharomyces pastorianus
cggatgcatctcataatttgacgaa

SEQ ID NO: 193623 - DNA, 25 bp, Saccharomyces pastorianus
taaaatggtcatttgccgtggcata

SEQ ID NO: 193624 - DNA, 25 bp, Saccharomyces pastorianus
gaaatacactttctactatagattg

SEQ ID NO: 193625 - DNA, 25 bp, Saccharomyces pastorianus
gtatctcatggattgatggacagtt

SEQ ID NO: 193626 - DNA, 25 bp, Saccharomyces pastorianus
atggacagttcctatcagaaagttt

SEQ ID NO: 193627 - DNA, 25 bp, Saccharomyces pastorianus
gccgtggcatattactcggatgcat

SEQ ID NO: 193628 - DNA, 25 bp, Saccharomyces pastorianus
tcagccaagcttgattggaacctgg

SEQ ID NO: 193629 - DNA, 25 bp, Saccharomyces pastorianus
ttgggcacgaaagttcatgcactac

SEQ ID NO: 193630 - DNA, 25 bp, Saccharomyces pastorianus
tatcgctacttcaccagtacacgaa

SEQ ID NO: 193631 - DNA, 25 bp, Saccharomyces pastorianus
gaaggccgaagaacttatcttcacc

SEQ ID NO: 193632 - DNA, 25 bp, Saccharomyces pastorianus
aaatcctctggatggtatcgctact

SEQ ID NO: 193633 - DNA, 25 bp, Saccharomyces pastorianus
acttcaccagtacacgaaattgcgt

SEQ ID NO: 193634 - DNA, 25 bp, Saccharomyces pastorianus
aagaacttatcttcacctctgtgaa

SEQ ID NO: 193635 - DNA, 25 bp, Saccharomyces pastorianus
atcttcacctctgtgaatttgctag

SEQ ID NO: 193636 - DNA, 25 bp, Saccharomyces pastorianus
gcgtacttctacaatggttataata

SEQ ID NO: 193637 - DNA, 25 bp, Saccharomyces pastorianus
cttcaaatcgaagaacctgccatta

SEQ ID NO: 193638 - DNA, 25 bp, Saccharomyces pastorianus
ggatggtatcgctacttcaccagta

SEQ ID NO: 193639 - DNA, 25 bp, Saccharomyces pastorianus
gaaattgcgtacttctacaatggtt

SEQ ID NO: 193640 - DNA, 25 bp, Saccharomyces pastorianus
cctctgtgaatttgctaggtaagaa

SEQ ID NO: 193641 - DNA, 25 bp, Saccharomyces pastorianus
gattccggagcaattaatactttac

SEQ ID NO: 193642 - DNA, 25 bp, Saccharomyces pastorianus
tatctggaagcggtctaacttgccc

SEQ ID NO: 193643 - DNA, 25 bp, Saccharomyces pastorianus
atactttacccgaagatggattgat

SEQ ID NO: 193644 - DNA, 25 bp, Saccharomyces pastorianus
cgggtgattccggagcaattaatac

SEQ ID NO: 193645 - DNA, 25 bp, Saccharomyces pastorianus
atagtctattggcagaaatttacac

SEQ ID NO: 193646 - DNA, 25 bp, Saccharomyces pastorianus
atcatagtccgtgatatctggaagc

SEQ ID NO: 193647 - DNA, 25 bp, Saccharomyces pastorianus
gaaatttacacgaaggtagacacaa

SEQ ID NO: 193648 - DNA, 25 bp, Saccharomyces pastorianus
gtctaacttgcccaatagtctattg

SEQ ID NO: 193649 - DNA, 25 bp, Saccharomyces pastorianus
gatattgggtatcatagtccgtgat

SEQ ID NO: 193650 - DNA, 25 bp, Saccharomyces pastorianus
ttttattgtgggtatgtggctggtc

SEQ ID NO: 193651 - DNA, 25 bp, Saccharomyces pastorianus
gaagcggtctaacttgcccaatagt

SEQ ID NO: 193652 - DNA, 25 bp, Saccharomyces pastorianus
ttagtcacaaaaagtccctgagggt

SEQ ID NO: 193653 - DNA, 25 bp, Saccharomyces pastorianus
aagtcaacgaccttctcaaagaaat

SEQ ID NO: 193654 - DNA, 25 bp, Saccharomyces pastorianus
aaaagccagcgaggctcattctggg

SEQ ID NO: 193655 - DNA, 25 bp, Saccharomyces pastorianus
gtccctgagggtgagcagtctgaac

SEQ ID NO: 193656 - DNA, 25 bp, Saccharomyces pastorianus
gaaaccgagactaacaattctatca

SEQ ID NO: 193657 - DNA, 25 bp, Saccharomyces pastorianus
ttacaaacgccaatgaagaccaaat

SEQ ID NO: 193658 - DNA, 25 bp, Saccharomyces pastorianus
agaagagataaagaacctgcccttt

SEQ ID NO: 193659 - DNA, 25 bp, Saccharomyces pastorianus
aaaggtcgtcaagaagcacgtatag

SEQ ID NO: 193660 - DNA, 25 bp, Saccharomyces pastorianus
aattcacaataagctcttgggcaaa

SEQ ID NO: 193661 - DNA, 25 bp, Saccharomyces pastorianus
ctgccctttaagaggctagtacaaa

SEQ ID NO: 193662 - DNA, 25 bp, Saccharomyces pastorianus
atagataccgaagcaaacactgaga

SEQ ID NO: 193663 - DNA, 25 bp, Saccharomyces pastorianus
cgagatatatcttcattttcattaa

SEQ ID NO: 193664 - DNA, 25 bp, Saccharomyces pastorianus
ttcctgtttttcttcctttgaggct

SEQ ID NO: 193665 - DNA, 25 bp, Saccharomyces pastorianus
gagcttattagtttcctgtttttct

SEQ ID NO: 193666 - DNA, 25 bp, Saccharomyces pastorianus
acagttgtaatctttcatttttctt

SEQ ID NO: 193667 - DNA, 25 bp, Saccharomyces pastorianus
aggctttattggcttgcttttgtaa

SEQ ID NO: 193668 - DNA, 25 bp, Saccharomyces pastorianus
agtgttttccaaacctgctgcagaa

SEQ ID NO: 193669 - DNA, 25 bp, Saccharomyces pastorianus
gcacgtttgagcttattagtttcct

SEQ ID NO: 193670 - DNA, 25 bp, Saccharomyces pastorianus
ggcttgcttttgtaattgttttgat

SEQ ID NO: 193671 - DNA, 25 bp, Saccharomyces pastorianus
gcattggatgcatatatacgagata

SEQ ID NO: 193672 - DNA, 25 bp, Saccharomyces pastorianus
tttctttcttatagcattggatgca

SEQ ID NO: 193673 - DNA, 25 bp, Saccharomyces pastorianus
tcctttgaggctttattggcttgct

SEQ ID NO: 193674 - DNA, 25 bp, Saccharomyces pastorianus
ttatcttcacacctacacatagcga

SEQ ID NO: 193675 - DNA, 25 bp, Saccharomyces pastorianus
gaagcaccaatgataggagccctcc

SEQ ID NO: 193676 - DNA, 25 bp, Saccharomyces pastorianus
aaattggtaacaggctcgatggaca

SEQ ID NO: 193677 - DNA, 25 bp, Saccharomyces pastorianus
ggagccctccaatgttacaactctg

SEQ ID NO: 193678 - DNA, 25 bp, Saccharomyces pastorianus
tggcattgtgcgactatgggatcta

SEQ ID NO: 193679 - DNA, 25 bp, Saccharomyces pastorianus
gacgggcaaatgtattcagcaactt

SEQ ID NO: 193680 - DNA, 25 bp, Saccharomyces pastorianus
atgcctgcacgttcattaaacaatg

SEQ ID NO: 193681 - DNA, 25 bp, Saccharomyces pastorianus
tcagcaacttgaccttatcttcaca

SEQ ID NO: 193682 - DNA, 25 bp, Saccharomyces pastorianus
gttggcaaaccggtgagattactag

SEQ ID NO: 193683 - DNA, 25 bp, Saccharomyces pastorianus
gcatgtttacttggcacagaagcac

SEQ ID NO: 193684 - DNA, 25 bp, Saccharomyces pastorianus
ttccactgggatttaacgacgggca

SEQ ID NO: 193685 - DNA, 25 bp, Saccharomyces pastorianus
atatcggcgcttttactgcatgctg

SEQ ID NO: 193686 - DNA, 25 bp, Saccharomyces pastorianus
ttgtcgtcatcgctgttcatataat

SEQ ID NO: 193687 - DNA, 25 bp, Saccharomyces pastorianus
tctcctgcgctttctgacgaaaatt

SEQ ID NO: 193688 - DNA, 25 bp, Saccharomyces pastorianus
ttttttctcttgacacttcggcgta

SEQ ID NO: 193689 - DNA, 25 bp, Saccharomyces pastorianus
gtaacacacttgtagcctgctatgc

SEQ ID NO: 193690 - DNA, 25 bp, Saccharomyces pastorianus
aagcgtagcctcatgactagttgta

SEQ ID NO: 193691 - DNA, 25 bp, Saccharomyces pastorianus
atcgccactggtacaagccgtatgg

SEQ ID NO: 193692 - DNA, 25 bp, Saccharomyces pastorianus
tataatcgtcgtcactcatatcggc

SEQ ID NO: 193693 - DNA, 25 bp, Saccharomyces pastorianus
agccgtatggtgcttttttgctcat

SEQ ID NO: 193694 - DNA, 25 bp, Saccharomyces pastorianus
atgacttcgtttcaagcggtctctt

SEQ ID NO: 193695 - DNA, 25 bp, Saccharomyces pastorianus
tagttgcaacgtagtcttcttctct

SEQ ID NO: 193696 - DNA, 25 bp, Saccharomyces pastorianus
ccgttcgacagtattggcgcatgac

SEQ ID NO: 193697 - DNA, 25 bp, Saccharomyces pastorianus
gtcatgaggctacgcttttcgagta

SEQ ID NO: 193698 - DNA, 25 bp, Saccharomyces pastorianus
catacggcttgtaccagtggcgatg

SEQ ID NO: 193699 - DNA, 25 bp, Saccharomyces pastorianus
agactagacttgattcgccgcgata

SEQ ID NO: 193700 - DNA, 25 bp, Saccharomyces pastorianus
gattggtccgcgaaaccatcgcaac

SEQ ID NO: 193701 - DNA, 25 bp, Saccharomyces pastorianus
ggtagacgttttcgcctttgaccag

SEQ ID NO: 193702 - DNA, 25 bp, Saccharomyces pastorianus
ttgaagccgaagaacgctacgcgcg

SEQ ID NO: 193703 - DNA, 25 bp, Saccharomyces pastorianus
atgaccaaagacgagccggctacct

SEQ ID NO: 193704 - DNA, 25 bp, Saccharomyces pastorianus
atgagcagtgccttgatggatgcaa

SEQ ID NO: 193705 - DNA, 25 bp, Saccharomyces pastorianus
accctagcggctgtgagtttagata

SEQ ID NO: 193706 - DNA, 25 bp, Saccharomyces pastorianus
gtggcacccggacaaacatcgttat

SEQ ID NO: 193707 - DNA, 25 bp, Saccharomyces pastorianus
gtcaatggtgcttgctcttacgaaa

SEQ ID NO: 193708 - DNA, 25 bp, Saccharomyces pastorianus
taacaacgctggtgtctctgtggaa

SEQ ID NO: 193709 - DNA, 25 bp, Saccharomyces pastorianus
gaaaatggtgtctactctggctctg

SEQ ID NO: 193710 - DNA, 25 bp, Saccharomyces pastorianus
gcttgttctccaggttacgctaaga

SEQ ID NO: 193711 - DNA, 25 bp, Saccharomyces pastorianus
accgatggctctaccgtcaatggtg

SEQ ID NO: 193712 - DNA, 25 bp, Saccharomyces pastorianus
gtggtaccgattatccaggttctga

SEQ ID NO: 193713 - DNA, 25 bp, Saccharomyces pastorianus
tgttaacaaggtctccggctccatt

SEQ ID NO: 193714 - DNA, 25 bp, Saccharomyces pastorianus
gaaaacatggtcgttcctaccgtag

SEQ ID NO: 193715 - DNA, 25 bp, Saccharomyces pastorianus
aaggctctgctcaagctgttaacaa

SEQ ID NO: 193716 - DNA, 25 bp, Saccharomyces pastorianus
aatggccttctgaacaaccttccga

SEQ ID NO: 193717 - DNA, 25 bp, Saccharomyces pastorianus
gctccattgctatctgtggtaccga

SEQ ID NO: 193718 - DNA, 25 bp, Saccharomyces pastorianus
ttgcaaagctcgcctgataagccct

SEQ ID NO: 193719 - DNA, 25 bp, Saccharomyces pastorianus
agttttgcaaagctcgcctgataag

SEQ ID NO: 193720 - DNA, 25 bp, Saccharomyces pastorianus
atacgagttttgcaaagctcgcctg

SEQ ID NO: 193721 - DNA, 25 bp, Saccharomyces pastorianus
tggtacatacgagttttgcaaagct

SEQ ID NO: 193722 - DNA, 25 bp, Saccharomyces pastorianus
gcagtatattttggtacatacgagt

SEQ ID NO: 193723 - DNA, 25 bp, Saccharomyces pastorianus
ttttgcaaagctcgcctgataagcc

SEQ ID NO: 193724 - DNA, 25 bp, Saccharomyces pastorianus
ggtacatacgagttttgcaaagctc

SEQ ID NO: 193725 - DNA, 25 bp, Saccharomyces pastorianus
gttttgcaaagctcgcctgataagc

SEQ ID NO: 193726 - DNA, 25 bp, Saccharomyces pastorianus
acgagttttgcaaagctcgcctgat

SEQ ID NO: 193727 - DNA, 25 bp, Saccharomyces pastorianus
gagttttgcaaagctcgcctgataa

SEQ ID NO: 193728 - DNA, 25 bp, Saccharomyces pastorianus
attttggtacatacgagttttgcaa

SEQ ID NO: 193729 - DNA, 25 bp, Saccharomyces pastorianus
gtaggtacgcatcatgtggttctaa

SEQ ID NO: 193730 - DNA, 25 bp, Saccharomyces pastorianus
tgaggcctctggtaggtgtcgcttc

SEQ ID NO: 193731 - DNA, 25 bp, Saccharomyces pastorianus
gacgtcattagcaagacagctgtct

SEQ ID NO: 193732 - DNA, 25 bp, Saccharomyces pastorianus
gcaggtatacctacaaccgtctttt

SEQ ID NO: 193733 - DNA, 25 bp, Saccharomyces pastorianus
gtttattgtacagcggtgtttccaa

SEQ ID NO: 193734 - DNA, 25 bp, Saccharomyces pastorianus
tacaaccgtctttttgctatgccca

SEQ ID NO: 193735 - DNA, 25 bp, Saccharomyces pastorianus
ggaaggtttctcatatacgcaggta

SEQ ID NO: 193736 - DNA, 25 bp, Saccharomyces pastorianus
gtgtcgcttctgtgattgtttggaa

SEQ ID NO: 193737 - DNA, 25 bp, Saccharomyces pastorianus
aaaggttcatttccataacgagaca

SEQ ID NO: 193738 - DNA, 25 bp, Saccharomyces pastorianus
gttctaaggtgttcttgaggcctct

SEQ ID NO: 193739 - DNA, 25 bp, Saccharomyces pastorianus
gctgtctacacgctgttaattaaac

SEQ ID NO: 193740 - DNA, 25 bp, Saccharomyces pastorianus
gttttacatcaggtcgaactttacg

SEQ ID NO: 193741 - DNA, 25 bp, Saccharomyces pastorianus
gcaactccgaaggtgccatagacca

SEQ ID NO: 193742 - DNA, 25 bp, Saccharomyces pastorianus
gtattaaatcatcactcaccaccac

SEQ ID NO: 193743 - DNA, 25 bp, Saccharomyces pastorianus
gaatggaaagtgcatggctgtttaa

SEQ ID NO: 193744 - DNA, 25 bp, Saccharomyces pastorianus
aaacgtaggcatccgcaatgtatgg

SEQ ID NO: 193745 - DNA, 25 bp, Saccharomyces pastorianus
accagctctgaatgcagcctacaaa

SEQ ID NO: 193746 - DNA, 25 bp, Saccharomyces pastorianus
ctcaccaccaccaacaatgtgtttt

SEQ ID NO: 193747 - DNA, 25 bp, Saccharomyces pastorianus
ggttaccgataataagcaactccga

SEQ ID NO: 193748 - DNA, 25 bp, Saccharomyces pastorianus
aggtgccatagaccagctctgaatg

SEQ ID NO: 193749 - DNA, 25 bp, Saccharomyces pastorianus
attcttcgattactttcttcacatg

SEQ ID NO: 193750 - DNA, 25 bp, Saccharomyces pastorianus
aagggccaattagtatgttcgagaa

SEQ ID NO: 193751 - DNA, 25 bp, Saccharomyces pastorianus
aaagcctgctagtgtcgatcctgct

SEQ ID NO: 193752 - DNA, 25 bp, Saccharomyces pastorianus
ggtataacagcggtggtaacttgaa

SEQ ID NO: 193753 - DNA, 25 bp, Saccharomyces pastorianus
gattactaacactcatatgaccggt

SEQ ID NO: 193754 - DNA, 25 bp, Saccharomyces pastorianus
aagcccgttttggtgaatgagttat

SEQ ID NO: 193755 - DNA, 25 bp, Saccharomyces pastorianus
gatagaatagagtttgaccccaaga

SEQ ID NO: 193756 - DNA, 25 bp, Saccharomyces pastorianus
aagacttgaaagacggttggccaca

SEQ ID NO: 193757 - DNA, 25 bp, Saccharomyces pastorianus
tttcaaatacctttccacctacgat

SEQ ID NO: 193758 - DNA, 25 bp, Saccharomyces pastorianus
gaaaatgtgcaattaccgcaatttg

SEQ ID NO: 193759 - DNA, 25 bp, Saccharomyces pastorianus
gtgtcgatcctgctactatcaaaag

SEQ ID NO: 193760 - DNA, 25 bp, Saccharomyces pastorianus
aaggtatttcctgcaaagacttgaa

SEQ ID NO: 193761 - DNA, 25 bp, Saccharomyces pastorianus
attccccttcggaactgctgaagtt

SEQ ID NO: 193762 - DNA, 25 bp, Saccharomyces pastorianus
gtttgttccatcttattttgcataa

SEQ ID NO: 193763 - DNA, 25 bp, Saccharomyces pastorianus
atagttatatttacttggtcgcata

SEQ ID NO: 193764 - DNA, 25 bp, Saccharomyces pastorianus
tttctttatgatgtacgcacgcacg

SEQ ID NO: 193765 - DNA, 25 bp, Saccharomyces pastorianus
gaaaaactattactcgcggcaagct

SEQ ID NO: 193766 - DNA, 25 bp, Saccharomyces pastorianus
tcgcatatgtgctgaagggtttgtt

SEQ ID NO: 193767 - DNA, 25 bp, Saccharomyces pastorianus
ggcaagcttctgagtttacattaaa

SEQ ID NO: 193768 - DNA, 25 bp, Saccharomyces pastorianus
ttctttctttatgatgtacgcacgc

SEQ ID NO: 193769 - DNA, 25 bp, Saccharomyces pastorianus
tattactcgcggcaagcttctgagt

SEQ ID NO: 193770 - DNA, 25 bp, Saccharomyces pastorianus
tcgcggcaagcttctgagtttacat

SEQ ID NO: 193771 - DNA, 25 bp, Saccharomyces pastorianus
gagcaaattgaaaatgtcgcatatg

SEQ ID NO: 193772 - DNA, 25 bp, Saccharomyces pastorianus
gaagggtttgtttgttccatcttat

SEQ ID NO: 193773 - DNA, 25 bp, Saccharomyces pastorianus
tagagatgtcaagctacctcggcat

SEQ ID NO: 193774 - DNA, 25 bp, Saccharomyces pastorianus
tgccctctttctgctacggaattaa

SEQ ID NO: 193775 - DNA, 25 bp, Saccharomyces pastorianus
tgaatatactacatggtgccctctt

SEQ ID NO: 193776 - DNA, 25 bp, Saccharomyces pastorianus
actgctaccgtcaatgatgtcgtta

SEQ ID NO: 193777 - DNA, 25 bp, Saccharomyces pastorianus
gaaactgcttcacctgctatcgttt

SEQ ID NO: 193778 - DNA, 25 bp, Saccharomyces pastorianus
gttccaacttctgggactacttcta

SEQ ID NO: 193779 - DNA, 25 bp, Saccharomyces pastorianus
aatgtttctgcttctgaggctgtca

SEQ ID NO: 193780 - DNA, 25 bp, Saccharomyces pastorianus
gtcgttacagtttattccacatgga

SEQ ID NO: 193781 - DNA, 25 bp, Saccharomyces pastorianus
ttagtgtatctcaacagcctcgtgg

SEQ ID NO: 193782 - DNA, 25 bp, Saccharomyces pastorianus
actagcggttagttctgacatcgaa

SEQ ID NO: 193783 - DNA, 25 bp, Saccharomyces pastorianus
aggcttcattcgtttcagaggctgc

SEQ ID NO: 193784 - DNA, 25 bp, Saccharomyces pastorianus
tcgaaggactctcttatagcgtcgt

SEQ ID NO: 193785 - DNA, 25 bp, Saccharomyces pastorianus
tttcataatgtcacgccgactggaa

SEQ ID NO: 193786 - DNA, 25 bp, Saccharomyces pastorianus
agcgtaggtttatcactcaatcttt

SEQ ID NO: 193787 - DNA, 25 bp, Saccharomyces pastorianus
tcaatatctctccaatacaccagtt

SEQ ID NO: 193788 - DNA, 25 bp, Saccharomyces pastorianus
ttttttatctcaatatggccaccga

SEQ ID NO: 193789 - DNA, 25 bp, Saccharomyces pastorianus
atagcgtcgttgtttgtctgtggat

SEQ ID NO: 193790 - DNA, 25 bp, Saccharomyces pastorianus
gtacgttatatcttcgtgcatctag

SEQ ID NO: 193791 - DNA, 25 bp, Saccharomyces pastorianus
gatatgttactcctcaatttctgtt

SEQ ID NO: 193792 - DNA, 25 bp, Saccharomyces pastorianus
gcgaagcttctatccagtatcttat

SEQ ID NO: 193793 - DNA, 25 bp, Saccharomyces pastorianus
tacaccagttattcgctgaagccat

SEQ ID NO: 193794 - DNA, 25 bp, Saccharomyces pastorianus
tatgcgctctttattataccgtatg

SEQ ID NO: 193795 - DNA, 25 bp, Saccharomyces pastorianus
ggtggttcaaacttatctcaagggc

SEQ ID NO: 193796 - DNA, 25 bp, Saccharomyces pastorianus
acgatccatgcttggtgcacgtaat

SEQ ID NO: 193797 - DNA, 25 bp, Saccharomyces pastorianus
catcccacaggatcctactttattt

SEQ ID NO: 193798 - DNA, 25 bp, Saccharomyces pastorianus
aagacaacttttgtgcttggcacga

SEQ ID NO: 193799 - DNA, 25 bp, Saccharomyces pastorianus
gaaattctataagctgcatcccaca

SEQ ID NO: 193800 - DNA, 25 bp, Saccharomyces pastorianus
actattgctcatcgattaaggtcag

SEQ ID NO: 193801 - DNA, 25 bp, Saccharomyces pastorianus
gaagcaaccgcctcaatagattata

SEQ ID NO: 193802 - DNA, 25 bp, Saccharomyces pastorianus
gagcagcctaatttttctagtcata

SEQ ID NO: 193803 - DNA, 25 bp, Saccharomyces pastorianus
aacatatccctttagagcgtttaag

SEQ ID NO: 193804 - DNA, 25 bp, Saccharomyces pastorianus
gaaataccattttttaccgcctctg

SEQ ID NO: 193805 - DNA, 25 bp, Saccharomyces pastorianus
gatcctttcgatcggtattctgatg

SEQ ID NO: 193806 - DNA, 25 bp, Saccharomyces pastorianus
atttttgcaaatcgagtcagtccat

SEQ ID NO: 193807 - DNA, 25 bp, Saccharomyces pastorianus
ggttcctgattctgtacaacttgat

SEQ ID NO: 193808 - DNA, 25 bp, Saccharomyces pastorianus
actgcgaatgtggttgataataaga

SEQ ID NO: 193809 - DNA, 25 bp, Saccharomyces pastorianus
gctcaaatgaagaggtatttactca

SEQ ID NO: 193810 - DNA, 25 bp, Saccharomyces pastorianus
gtgcaagatagctcagcacttgttc

SEQ ID NO: 193811 - DNA, 25 bp, Saccharomyces pastorianus
catgggtttatttggttcctgattc

SEQ ID NO: 193812 - DNA, 25 bp, Saccharomyces pastorianus
aagaagcgtttacttttcgtgcaag

SEQ ID NO: 193813 - DNA, 25 bp, Saccharomyces pastorianus
aatcgagtcagtccatgggtttatt

SEQ ID NO: 193814 - DNA, 25 bp, Saccharomyces pastorianus
agcacttgttctagggcttgttgca

SEQ ID NO: 193815 - DNA, 25 bp, Saccharomyces pastorianus
gttctagggcttgttgcaggatttt

SEQ ID NO: 193816 - DNA, 25 bp, Saccharomyces pastorianus
tacttttcgtgcaagatagctcagc

SEQ ID NO: 193817 - DNA, 25 bp, Saccharomyces pastorianus
agaccaatttggaccctttcaatcg

SEQ ID NO: 193818 - DNA, 25 bp, Saccharomyces pastorianus
ccgtaccatcttaacaattgcacat

SEQ ID NO: 193819 - DNA, 25 bp, Saccharomyces pastorianus
aagggctgttgagcaggcacattta

SEQ ID NO: 193820 - DNA, 25 bp, Saccharomyces pastorianus
aagcaacggcttctgtggatatgga

SEQ ID NO: 193821 - DNA, 25 bp, Saccharomyces pastorianus
aatgctgcacagtaaaccaagaggt

SEQ ID NO: 193822 - DNA, 25 bp, Saccharomyces pastorianus
aagagcgctgctaaaccgttccaaa

SEQ ID NO: 193823 - DNA, 25 bp, Saccharomyces pastorianus
ttggtccttgatgaagcaacggctt

SEQ ID NO: 193824 - DNA, 25 bp, Saccharomyces pastorianus
ggcacatttaaagcctcatctggaa

SEQ ID NO: 193825 - DNA, 25 bp, Saccharomyces pastorianus
gattcaccctcgaaattgttatccg

SEQ ID NO: 193826 - DNA, 25 bp, Saccharomyces pastorianus
gataattgttcttgaccagggtagt

SEQ ID NO: 193827 - DNA, 25 bp, Saccharomyces pastorianus
tggaccctttcaatcgttattcaga

SEQ ID NO: 193828 - DNA, 25 bp, Saccharomyces pastorianus
gaatattattccaatactggctttt

SEQ ID NO: 193829 - DNA, 25 bp, Saccharomyces pastorianus
ttgtgtcaagttgttgccactctat

SEQ ID NO: 193830 - DNA, 25 bp, Saccharomyces pastorianus
gccactctatcttttgtttttgtta

SEQ ID NO: 193831 - DNA, 25 bp, Saccharomyces pastorianus
tactggcttttttacaattcattaa

SEQ ID NO: 193832 - DNA, 25 bp, Saccharomyces pastorianus
taatggcgcacattatgcaagcgcg

SEQ ID NO: 193833 - DNA, 25 bp, Saccharomyces pastorianus
atttactctcaaccgcctttcttgt

SEQ ID NO: 193834 - DNA, 25 bp, Saccharomyces pastorianus
ccattgcctcttttcttactatatt

SEQ ID NO: 193835 - DNA, 25 bp, Saccharomyces pastorianus
agatttctgcccattgcctcttttc

SEQ ID NO: 193836 - DNA, 25 bp, Saccharomyces pastorianus
ttttgttacagggtaatggcgcaca

SEQ ID NO: 193837 - DNA, 25 bp, Saccharomyces pastorianus
ggaaccaaaccacatcatttactct

SEQ ID NO: 193838 - DNA, 25 bp, Saccharomyces pastorianus
agaaaattttcttctctatgaacct

SEQ ID NO: 193839 - DNA, 25 bp, Saccharomyces pastorianus
acgtgtcagcgtatttagggtgtca

SEQ ID NO: 193840 - DNA, 25 bp, Saccharomyces pastorianus
tatcagtgaaatcggcagtgtcgct

SEQ ID NO: 193841 - DNA, 25 bp, Saccharomyces pastorianus
cgcataccacgtccatatcagtgaa

SEQ ID NO: 193842 - DNA, 25 bp, Saccharomyces pastorianus
tctcctcgtctttagtccaattttt

SEQ ID NO: 193843 - DNA, 25 bp, Saccharomyces pastorianus
tttgcaaacagagggcgctctcctc

SEQ ID NO: 193844 - DNA, 25 bp, Saccharomyces pastorianus
acctcaattttcgttttctcattct

SEQ ID NO: 193845 - DNA, 25 bp, Saccharomyces pastorianus
tcatttgtcttcagaatagcggcaa

SEQ ID NO: 193846 - DNA, 25 bp, Saccharomyces pastorianus
gaaactatcatttgtcttcagaata

SEQ ID NO: 193847 - DNA, 25 bp, Saccharomyces pastorianus
agaatagcggcaataccaccatctc

SEQ ID NO: 193848 - DNA, 25 bp, Saccharomyces pastorianus
agcgtatttagggtgtcaatgcaac

SEQ ID NO: 193849 - DNA, 25 bp, Saccharomyces pastorianus
aatcggcagtgtcgctttgcaaaca

SEQ ID NO: 193850 - DNA, 25 bp, Saccharomyces pastorianus
ggcgggtggaataagcaagctctca

SEQ ID NO: 193851 - DNA, 25 bp, Saccharomyces pastorianus
aagacagtgaagatacgcccggcgt

SEQ ID NO: 193852 - DNA, 25 bp, Saccharomyces pastorianus
atacgcacgaatatgcccgattctc

SEQ ID NO: 193853 - DNA, 25 bp, Saccharomyces pastorianus
tggaataagcaagctctcatttaga

SEQ ID NO: 193854 - DNA, 25 bp, Saccharomyces pastorianus
gacaacggacaaggaatacgcacga

SEQ ID NO: 193855 - DNA, 25 bp, Saccharomyces pastorianus
ctcacgcgacaaagcttagaaaaga

SEQ ID NO: 193856 - DNA, 25 bp, Saccharomyces pastorianus
tttggatcccctggccgaagaagac

SEQ ID NO: 193857 - DNA, 25 bp, Saccharomyces pastorianus
caccaccagcactagcttagatttc

SEQ ID NO: 193858 - DNA, 25 bp, Saccharomyces pastorianus
cagcactagcttagatttccagaga

SEQ ID NO: 193859 - DNA, 25 bp, Saccharomyces pastorianus
aatatgcccgattctctttggatcc

SEQ ID NO: 193860 - DNA, 25 bp, Saccharomyces pastorianus
atcccctggccgaagaagacagtga

SEQ ID NO: 193861 - DNA, 25 bp, Saccharomyces pastorianus
aagaccaagtcatctatttcagaca

SEQ ID NO: 193862 - DNA, 25 bp, Saccharomyces pastorianus
gggttggtttacgatgtctgtattt

SEQ ID NO: 193863 - DNA, 25 bp, Saccharomyces pastorianus
acatcggacctgagtgacttctcat

SEQ ID NO: 193864 - DNA, 25 bp, Saccharomyces pastorianus
taaatctgttcagcgcggcaaaaga

SEQ ID NO: 193865 - DNA, 25 bp, Saccharomyces pastorianus
agagcctggtttagaaggcctggtt

SEQ ID NO: 193866 - DNA, 25 bp, Saccharomyces pastorianus
aaggcctggttggaagaagagaaat

SEQ ID NO: 193867 - DNA, 25 bp, Saccharomyces pastorianus
tcagcgcggcaaaagaacgtttggt

SEQ ID NO: 193868 - DNA, 25 bp, Saccharomyces pastorianus
tagagcaagaagaacatcggacctg

SEQ ID NO: 193869 - DNA, 25 bp, Saccharomyces pastorianus
gagtgacttctcatacaataacgat

SEQ ID NO: 193870 - DNA, 25 bp, Saccharomyces pastorianus
ggacctgagtgacttctcatacaat

SEQ ID NO: 193871 - DNA, 25 bp, Saccharomyces pastorianus
gaaatgattatgagagcctggttta

SEQ ID NO: 193872 - DNA, 25 bp, Saccharomyces pastorianus
acttatttcaatatacccacaaaat

SEQ ID NO: 193873 - DNA, 25 bp, Saccharomyces pastorianus
ttatttcaatatacccacaaaatca

SEQ ID NO: 193874 - DNA, 25 bp, Saccharomyces pastorianus
aatatacccacaaaatcaccaccaa

SEQ ID NO: 193875 - DNA, 25 bp, Saccharomyces pastorianus
tcaatatacccacaaaatcaccacc

SEQ ID NO: 193876 - DNA, 25 bp, Saccharomyces pastorianus
tatttcaatatacccacaaaatcac

SEQ ID NO: 193877 - DNA, 25 bp, Saccharomyces pastorianus
cacttatttcaatatacccacaaaa

SEQ ID NO: 193878 - DNA, 25 bp, Saccharomyces pastorianus
atatacccacaaaatcaccaccaaa

SEQ ID NO: 193879 - DNA, 25 bp, Saccharomyces pastorianus
tttcaatatacccacaaaatcacca

SEQ ID NO: 193880 - DNA, 25 bp, Saccharomyces pastorianus
atacccacaaaatcaccaccaaaat

SEQ ID NO: 193881 - DNA, 25 bp, Saccharomyces pastorianus
cttatttcaatatacccacaaaatc

SEQ ID NO: 193882 - DNA, 25 bp, Saccharomyces pastorianus
ttcaatatacccacaaaatcaccac

SEQ ID NO: 193883 - DNA, 25 bp, Saccharomyces pastorianus
ttgggttacaaagctaagcaaggtt

SEQ ID NO: 193884 - DNA, 25 bp, Saccharomyces pastorianus
tagaagattgggttacaaagctaag

SEQ ID NO: 193885 - DNA, 25 bp, Saccharomyces pastorianus
attgggttacaaagctaagcaaggt

SEQ ID NO: 193886 - DNA, 25 bp, Saccharomyces pastorianus
aagattgggttacaaagctaagcaa

SEQ ID NO: 193887 - DNA, 25 bp, Saccharomyces pastorianus
tgggttacaaagctaagcaaggttt

SEQ ID NO: 193888 - DNA, 25 bp, Saccharomyces pastorianus
agaagattgggttacaaagctaagc

SEQ ID NO: 193889 - DNA, 25 bp, Saccharomyces pastorianus
ctagaagattgggttacaaagctaa

SEQ ID NO: 193890 - DNA, 25 bp, Saccharomyces pastorianus
gaagattgggttacaaagctaagca

SEQ ID NO: 193891 - DNA, 25 bp, Saccharomyces pastorianus
gattgggttacaaagctaagcaagg

SEQ ID NO: 193892 - DNA, 25 bp, Saccharomyces pastorianus
agattgggttacaaagctaagcaag

SEQ ID NO: 193893 - DNA, 25 bp, Saccharomyces pastorianus
ccggttatccatgattgttggcaaa

SEQ ID NO: 193894 - DNA, 25 bp, Saccharomyces pastorianus
acagagattaagttttgaggaacat

SEQ ID NO: 193895 - DNA, 25 bp, Saccharomyces pastorianus
caggaaatgtggctcaacagagatt

SEQ ID NO: 193896 - DNA, 25 bp, Saccharomyces pastorianus
attgttggcaaaataaagagtactc

SEQ ID NO: 193897 - DNA, 25 bp, Saccharomyces pastorianus
gtggctcaacagagattaagttttg

SEQ ID NO: 193898 - DNA, 25 bp, Saccharomyces pastorianus
ggttatccatgattgttggcaaaat

SEQ ID NO: 193899 - DNA, 25 bp, Saccharomyces pastorianus
agtactcaactcaaagatattcagg

SEQ ID NO: 193900 - DNA, 25 bp, Saccharomyces pastorianus
ggaaatgtggctcaacagagattaa

SEQ ID NO: 193901 - DNA, 25 bp, Saccharomyces pastorianus
ttatccatgattgttggcaaaataa

SEQ ID NO: 193902 - DNA, 25 bp, Saccharomyces pastorianus
gatattcaggaaatgtggctcaaca

SEQ ID NO: 193903 - DNA, 25 bp, Saccharomyces pastorianus
attcaggaaatgtggctcaacagag

SEQ ID NO: 193904 - DNA, 25 bp, Saccharomyces pastorianus
gacggtaaaggtcttggcaatcttt

SEQ ID NO: 193905 - DNA, 25 bp, Saccharomyces pastorianus
atgtggtcgatcaagtacttagcgt

SEQ ID NO: 193906 - DNA, 25 bp, Saccharomyces pastorianus
gaagctgggtcgaagacaccgtttt

SEQ ID NO: 193907 - DNA, 25 bp, Saccharomyces pastorianus
agcgttacccaagttaccgacagca

SEQ ID NO: 193908 - DNA, 25 bp, Saccharomyces pastorianus
gtgacagtgacagcgttacccaagt

SEQ ID NO: 193909 - DNA, 25 bp, Saccharomyces pastorianus
gaacttggcagtggaaacaacagta

SEQ ID NO: 193910 - DNA, 25 bp, Saccharomyces pastorianus
gaagacaccgttttcagttggagaa

SEQ ID NO: 193911 - DNA, 25 bp, Saccharomyces pastorianus
gttggagaagagacatcgacggtaa

SEQ ID NO: 193912 - DNA, 25 bp, Saccharomyces pastorianus
gtacttcaagtacttaccagagaac

SEQ ID NO: 193913 - DNA, 25 bp, Saccharomyces pastorianus
aacggtaccatcttcagtgacagtg

SEQ ID NO: 193914 - DNA, 25 bp, Saccharomyces pastorianus
acagcaccttcgaccttgatgtggt

SEQ ID NO: 193915 - DNA, 25 bp, Saccharomyces pastorianus
gcccaaacgaaactctacttcaaag

SEQ ID NO: 193916 - DNA, 25 bp, Saccharomyces pastorianus
tcagcccaaacgaaactctacttca

SEQ ID NO: 193917 - DNA, 25 bp, Saccharomyces pastorianus
gattttcagcccaaacgaaactcta

SEQ ID NO: 193918 - DNA, 25 bp, Saccharomyces pastorianus
cccctgaactacaatggaccaagag

SEQ ID NO: 193919 - DNA, 25 bp, Saccharomyces pastorianus
ttcaaaggagtgaatacttggccaa

SEQ ID NO: 193920 - DNA, 25 bp, Saccharomyces pastorianus
atacttggccaaatttaatctggag

SEQ ID NO: 193921 - DNA, 25 bp, Saccharomyces pastorianus
aatctggaggtatacaattggagaa

SEQ ID NO: 193922 - DNA, 25 bp, Saccharomyces pastorianus
ggccaaatttaatctggaggtatac

SEQ ID NO: 193923 - DNA, 25 bp, Saccharomyces pastorianus
ggagaagggatttgccccctgaact

SEQ ID NO: 193924 - DNA, 25 bp, Saccharomyces pastorianus
actacaatggaccaagaggtcattg

SEQ ID NO: 193925 - DNA, 25 bp, Saccharomyces pastorianus
acgaaactctacttcaaaggagtga

SEQ ID NO: 193926 - DNA, 25 bp, Saccharomyces pastorianus
gagctcgcagatgcacagcgtcaat

SEQ ID NO: 193927 - DNA, 25 bp, Saccharomyces pastorianus
atggcagatagcgaggatacctctg

SEQ ID NO: 193928 - DNA, 25 bp, Saccharomyces pastorianus
ggcctggaagaagatggttacctca

SEQ ID NO: 193929 - DNA, 25 bp, Saccharomyces pastorianus
tgcagggcatcgacacaatcaacag

SEQ ID NO: 193930 - DNA, 25 bp, Saccharomyces pastorianus
aatcaacagcgtggagggcctggaa

SEQ ID NO: 193931 - DNA, 25 bp, Saccharomyces pastorianus
atacctctgtgatcctgcagggcat

SEQ ID NO: 193932 - DNA, 25 bp, Saccharomyces pastorianus
cagatgcacagcgtcaatgggaaga

SEQ ID NO: 193933 - DNA, 25 bp, Saccharomyces pastorianus
gtcaatgggaagagtcgctgcaaca

SEQ ID NO: 193934 - DNA, 25 bp, Saccharomyces pastorianus
gtcactcagcaacgagctcgcagat

SEQ ID NO: 193935 - DNA, 25 bp, Saccharomyces pastorianus
agaagatggttacctcagcgacgag

SEQ ID NO: 193936 - DNA, 25 bp, Saccharomyces pastorianus
agcgacgaggacacgtcactcagca

SEQ ID NO: 193937 - DNA, 25 bp, Saccharomyces pastorianus
agtattcttatagggcacggactag

SEQ ID NO: 193938 - DNA, 25 bp, Saccharomyces pastorianus
gagattgaccgaaccaattgcccga

SEQ ID NO: 193939 - DNA, 25 bp, Saccharomyces pastorianus
gatctgaacgtcatgaggctatttc

SEQ ID NO: 193940 - DNA, 25 bp, Saccharomyces pastorianus
gaacgatctgaacgtcatgaggcta

SEQ ID NO: 193941 - DNA, 25 bp, Saccharomyces pastorianus
aaccaattgcccgacgtacaaggag

SEQ ID NO: 193942 - DNA, 25 bp, Saccharomyces pastorianus
ggcacggactagagaacgatctgaa

SEQ ID NO: 193943 - DNA, 25 bp, Saccharomyces pastorianus
aatagtattcttatagggcacggac

SEQ ID NO: 193944 - DNA, 25 bp, Saccharomyces pastorianus
ttgaccgaaccaattgcccgacgta

SEQ ID NO: 193945 - DNA, 25 bp, Saccharomyces pastorianus
tgaacgtcatgaggctatttcataa

SEQ ID NO: 193946 - DNA, 25 bp, Saccharomyces pastorianus
gtccatgagattgaccgaaccaatt

SEQ ID NO: 193947 - DNA, 25 bp, Saccharomyces pastorianus
tagggcacggactagagaacgatct

SEQ ID NO: 193948 - DNA, 25 bp, Saccharomyces pastorianus
acctgtgcctgtgcctcttgatcaa

SEQ ID NO: 193949 - DNA, 25 bp, Saccharomyces pastorianus
atatcagccgcggatttttgaacaa

SEQ ID NO: 193950 - DNA, 25 bp, Saccharomyces pastorianus
gatttttgaacaatggctcctacag

SEQ ID NO: 193951 - DNA, 25 bp, Saccharomyces pastorianus
gtgaaccccagtgaaacctcactaa

SEQ ID NO: 193952 - DNA, 25 bp, Saccharomyces pastorianus
gatttcatcaatgtgaaccccagtg

SEQ ID NO: 193953 - DNA, 25 bp, Saccharomyces pastorianus
gaacaatggctcctacagacaatta

SEQ ID NO: 193954 - DNA, 25 bp, Saccharomyces pastorianus
ggctcctacagacaattagatttca

SEQ ID NO: 193955 - DNA, 25 bp, Saccharomyces pastorianus
tttacgatttcctacgaacactgcc

SEQ ID NO: 193956 - DNA, 25 bp, Saccharomyces pastorianus
caatgtgaaccccagtgaaacctca

SEQ ID NO: 193957 - DNA, 25 bp, Saccharomyces pastorianus
gaacactgcccaagatgataaatac

SEQ ID NO: 193958 - DNA, 25 bp, Saccharomyces pastorianus
tcctacgaacactgcccaagatgat

SEQ ID NO: 193959 - DNA, 25 bp, Saccharomyces pastorianus
tgccttcaagctccgtatatattat

SEQ ID NO: 193960 - DNA, 25 bp, Saccharomyces pastorianus
aagctccgtatatattatgtactag

SEQ ID NO: 193961 - DNA, 25 bp, Saccharomyces pastorianus
gaagagctaggaaagcacagcgcat

SEQ ID NO: 193962 - DNA, 25 bp, Saccharomyces pastorianus
gtcacctaggatggagcaccaacaa

SEQ ID NO: 193963 - DNA, 25 bp, Saccharomyces pastorianus
atattttctccagtgccttcaagct

SEQ ID NO: 193964 - DNA, 25 bp, Saccharomyces pastorianus
aaagcacagcgcatacgacggtcac

SEQ ID NO: 193965 - DNA, 25 bp, Saccharomyces pastorianus
acgacggtcacctaggatggagcac

SEQ ID NO: 193966 - DNA, 25 bp, Saccharomyces pastorianus
gcgcatacgacggtcacctaggatg

SEQ ID NO: 193967 - DNA, 25 bp, Saccharomyces pastorianus
tctatattttctccagtgccttcaa

SEQ ID NO: 193968 - DNA, 25 bp, Saccharomyces pastorianus
agtgccttcaagctccgtatatatt

SEQ ID NO: 193969 - DNA, 25 bp, Saccharomyces pastorianus
atgcttactctatattttctccagt

SEQ ID NO: 193970 - DNA, 25 bp, Saccharomyces pastorianus
gttgtcgcctctcataattaccaat

SEQ ID NO: 193971 - DNA, 25 bp, Saccharomyces pastorianus
tggcgaggattcttattttggtcac

SEQ ID NO: 193972 - DNA, 25 bp, Saccharomyces pastorianus
gggcccaccattggaaactaaagat

SEQ ID NO: 193973 - DNA, 25 bp, Saccharomyces pastorianus
gacctaattaccaaccatggcgcta

SEQ ID NO: 193974 - DNA, 25 bp, Saccharomyces pastorianus
tattttggtcacttggttgtcgcct

SEQ ID NO: 193975 - DNA, 25 bp, Saccharomyces pastorianus
taagcttgggctgaaactggttcgt

SEQ ID NO: 193976 - DNA, 25 bp, Saccharomyces pastorianus
aagacaactcttatgccaaatcgaa

SEQ ID NO: 193977 - DNA, 25 bp, Saccharomyces pastorianus
tgaagctggcccaagaaaacggcta

SEQ ID NO: 193978 - DNA, 25 bp, Saccharomyces pastorianus
ggcagataatgttacctatgaccta

SEQ ID NO: 193979 - DNA, 25 bp, Saccharomyces pastorianus
atctttggcgataaaacgggcactg

SEQ ID NO: 193980 - DNA, 25 bp, Saccharomyces pastorianus
gatcgtatcatcactcaagttgtca

SEQ ID NO: 193981 - DNA, 25 bp, Saccharomyces pastorianus
cattcatatgattcacgccattcct

SEQ ID NO: 193982 - DNA, 25 bp, Saccharomyces pastorianus
tcttcatgggtcagaacaccaaatt

SEQ ID NO: 193983 - DNA, 25 bp, Saccharomyces pastorianus
tgggtcagaacaccaaattttgtca

SEQ ID NO: 193984 - DNA, 25 bp, Saccharomyces pastorianus
tcacgccattcctataacatcagca

SEQ ID NO: 193985 - DNA, 25 bp, Saccharomyces pastorianus
acaccaaattttgtcaaagaggagt

SEQ ID NO: 193986 - DNA, 25 bp, Saccharomyces pastorianus
aatacattcatatgattcacgccat

SEQ ID NO: 193987 - DNA, 25 bp, Saccharomyces pastorianus
taaaattgatcacgccacgtatttt

SEQ ID NO: 193988 - DNA, 25 bp, Saccharomyces pastorianus
cgccattcctataacatcagcatct

SEQ ID NO: 193989 - DNA, 25 bp, Saccharomyces pastorianus
aaataaaattgatcacgccacgtat

SEQ ID NO: 193990 - DNA, 25 bp, Saccharomyces pastorianus
attcacgccattcctataacatcag

SEQ ID NO: 193991 - DNA, 25 bp, Saccharomyces pastorianus
gattcacgccattcctataacatca

SEQ ID NO: 193992 - DNA, 25 bp, Saccharomyces pastorianus
atctctggagcaagaatatcggtta

SEQ ID NO: 193993 - DNA, 25 bp, Saccharomyces pastorianus
atatcggttaatattgctcttgaac

SEQ ID NO: 193994 - DNA, 25 bp, Saccharomyces pastorianus
gtgatacgatctctggagcaagaat

SEQ ID NO: 193995 - DNA, 25 bp, Saccharomyces pastorianus
gatggataatgtgatacgatctctg

SEQ ID NO: 193996 - DNA, 25 bp, Saccharomyces pastorianus
tgctcttgaaccataggaacaaaaa

SEQ ID NO: 193997 - DNA, 25 bp, Saccharomyces pastorianus
ggctagctggtatggatcgttcaat

SEQ ID NO: 193998 - DNA, 25 bp, Saccharomyces pastorianus
gtatggatcgttcaatgagatgaaa

SEQ ID NO: 193999 - DNA, 25 bp, Saccharomyces pastorianus
agctggtatggatcgttcaatgaga

SEQ ID NO: 194000 - DNA, 25 bp, Saccharomyces pastorianus
aaaatcaacatagagcggctagctg

SEQ ID NO: 194001 - DNA, 25 bp, Saccharomyces pastorianus
gcggctagctggtatggatcgttca

SEQ ID NO: 194002 - DNA, 25 bp, Saccharomyces pastorianus
taatgtgatacgatctctggagcaa

SEQ ID NO: 194003 - DNA, 25 bp, Saccharomyces pastorianus
gccctgggaggagttatcttttctt

SEQ ID NO: 194004 - DNA, 25 bp, Saccharomyces pastorianus
tatcaccccggaattggtttatccg

SEQ ID NO: 194005 - DNA, 25 bp, Saccharomyces pastorianus
ctgggaggagttatcttttcttctt

SEQ ID NO: 194006 - DNA, 25 bp, Saccharomyces pastorianus
ggagttatcttttcttcttaacagc

SEQ ID NO: 194007 - DNA, 25 bp, Saccharomyces pastorianus
ttaacagcttatcaccccggaattg

SEQ ID NO: 194008 - DNA, 25 bp, Saccharomyces pastorianus
atgtggagacgtcggcgcgagccct

SEQ ID NO: 194009 - DNA, 25 bp, Saccharomyces pastorianus
ttcttaacagcttatcaccccggaa

SEQ ID NO: 194010 - DNA, 25 bp, Saccharomyces pastorianus
tttcttcttaacagcttatcacccc

SEQ ID NO: 194011 - DNA, 25 bp, Saccharomyces pastorianus
aacagcttatcaccccggaattggt

SEQ ID NO: 194012 - DNA, 25 bp, Saccharomyces pastorianus
tatcttttcttcttaacagcttatc

SEQ ID NO: 194013 - DNA, 25 bp, Saccharomyces pastorianus
gcgagccctgggaggagttatcttt

SEQ ID NO: 194014 - DNA, 25 bp, Saccharomyces pastorianus
ggtctctcgccaatatttagcttta

SEQ ID NO: 194015 - DNA, 25 bp, Saccharomyces pastorianus
atgtctgatcaaatgcccttccctt

SEQ ID NO: 194016 - DNA, 25 bp, Saccharomyces pastorianus
caaagttgccctctccaaattacaa

SEQ ID NO: 194017 - DNA, 25 bp, Saccharomyces pastorianus
atcactgtacttgttcgctatcggt

SEQ ID NO: 194018 - DNA, 25 bp, Saccharomyces pastorianus
gagggcacaaaacaccatgtctgat

SEQ ID NO: 194019 - DNA, 25 bp, Saccharomyces pastorianus
tggaatttaccacccacttagagct

SEQ ID NO: 194020 - DNA, 25 bp, Saccharomyces pastorianus
atttcacgtactttttcactctctt

SEQ ID NO: 194021 - DNA, 25 bp, Saccharomyces pastorianus
aactcgactcttcgaaggcacttta

SEQ ID NO: 194022 - DNA, 25 bp, Saccharomyces pastorianus
cttagagctgcattcccaaacaact

SEQ ID NO: 194023 - DNA, 25 bp, Saccharomyces pastorianus
aagttcttttcatctttccatcact

SEQ ID NO: 194024 - DNA, 25 bp, Saccharomyces pastorianus
ctctatgacgtcctgttccaaggaa

SEQ ID NO: 194025 - DNA, 25 bp, Saccharomyces pastorianus
tcattacgcgtatgggttttacacc

SEQ ID NO: 194026 - DNA, 25 bp, Saccharomyces pastorianus
gttcactttcattacgcgtatgggt

SEQ ID NO: 194027 - DNA, 25 bp, Saccharomyces pastorianus
aggatcggtcgattgtgcacctctt

SEQ ID NO: 194028 - DNA, 25 bp, Saccharomyces pastorianus
ggtcgattgtgcacctcttgcgagg

SEQ ID NO: 194029 - DNA, 25 bp, Saccharomyces pastorianus
atgctcttactcaaatccatccgaa

SEQ ID NO: 194030 - DNA, 25 bp, Saccharomyces pastorianus
gaagacatcaggatcggtcgattgt

SEQ ID NO: 194031 - DNA, 25 bp, Saccharomyces pastorianus
ttttacacccaaacactcgcataga

SEQ ID NO: 194032 - DNA, 25 bp, Saccharomyces pastorianus
aacctacgttcactttcattacgcg

SEQ ID NO: 194033 - DNA, 25 bp, Saccharomyces pastorianus
cactcgcatagacgttagactcctt

SEQ ID NO: 194034 - DNA, 25 bp, Saccharomyces pastorianus
actcaaatccatccgaagacatcag

SEQ ID NO: 194035 - DNA, 25 bp, Saccharomyces pastorianus
ttgtgcacctcttgcgaggccccaa

SEQ ID NO: 194036 - DNA, 25 bp, Saccharomyces pastorianus
tacccttttgttctactggagattt

SEQ ID NO: 194037 - DNA, 25 bp, Saccharomyces pastorianus
tttacccttttgttctactggagat

SEQ ID NO: 194038 - DNA, 25 bp, Saccharomyces pastorianus
atcgtttaacagatgtgccgcccca

SEQ ID NO: 194039 - DNA, 25 bp, Saccharomyces pastorianus
taggacatctgcgttatcgtttaac

SEQ ID NO: 194040 - DNA, 25 bp, Saccharomyces pastorianus
ttgttctactggagatttctgttct

SEQ ID NO: 194041 - DNA, 25 bp, Saccharomyces pastorianus
actggagatttctgttctccatgag

SEQ ID NO: 194042 - DNA, 25 bp, Saccharomyces pastorianus
cccttaggacatctgcgttatcgtt

SEQ ID NO: 194043 - DNA, 25 bp, Saccharomyces pastorianus
gtttaacagatgtgccgccccagcc

SEQ ID NO: 194044 - DNA, 25 bp, Saccharomyces pastorianus
ggacatctgcgttatcgtttaacag

SEQ ID NO: 194045 - DNA, 25 bp, Saccharomyces pastorianus
ttatcgtttaacagatgtgccgccc

SEQ ID NO: 194046 - DNA, 25 bp, Saccharomyces pastorianus
atggtttgtattcacactgaaaatc

SEQ ID NO: 194047 - DNA, 25 bp, Saccharomyces pastorianus
attcgatgattcacggaattctgca

SEQ ID NO: 194048 - DNA, 25 bp, Saccharomyces pastorianus
attacgtatcgcatttcgctgcgtt

SEQ ID NO: 194049 - DNA, 25 bp, Saccharomyces pastorianus
ggcgcaatgtgcgttcaaagattcg

SEQ ID NO: 194050 - DNA, 25 bp, Saccharomyces pastorianus
gcaattcacattacgtatcgcattt

SEQ ID NO: 194051 - DNA, 25 bp, Saccharomyces pastorianus
atttcgctgcgttcttcatcgatgc

SEQ ID NO: 194052 - DNA, 25 bp, Saccharomyces pastorianus
ttcttcatcgatgcgagaaccaaga

SEQ ID NO: 194053 - DNA, 25 bp, Saccharomyces pastorianus
gattcacggaattctgcaattcaca

SEQ ID NO: 194054 - DNA, 25 bp, Saccharomyces pastorianus
ccaagagatccgttgttgaaagttt

SEQ ID NO: 194055 - DNA, 25 bp, Saccharomyces pastorianus
gctgcgttcttcatcgatgcgagaa

SEQ ID NO: 194056 - DNA, 25 bp, Saccharomyces pastorianus
tgcgagaaccaagagatccgttgtt

SEQ ID NO: 194057 - DNA, 25 bp, Saccharomyces pastorianus
gtgcgttcaaagattcgatgattca

SEQ ID NO: 194058 - DNA, 25 bp, Saccharomyces pastorianus
gcaggttcacctacggaaaccttgt

SEQ ID NO: 194059 - DNA, 25 bp, Saccharomyces pastorianus
ttaatgatccttccgcaggttcacc

SEQ ID NO: 194060 - DNA, 25 bp, Saccharomyces pastorianus
tttctttaatgatccttccgcaggt

SEQ ID NO: 194061 - DNA, 25 bp, Saccharomyces pastorianus
tgctcttgccaaaacaaaaaaatcc

SEQ ID NO: 194062 - DNA, 25 bp, Saccharomyces pastorianus
tctttaatgatccttccgcaggttc

SEQ ID NO: 194063 - DNA, 25 bp, Saccharomyces pastorianus
atttctttaatgatccttccgcagg

SEQ ID NO: 194064 - DNA, 25 bp, Saccharomyces pastorianus
ttctttaatgatccttccgcaggtt

SEQ ID NO: 194065 - DNA, 25 bp, Saccharomyces pastorianus
tttaatgatccttccgcaggttcac

SEQ ID NO: 194066 - DNA, 25 bp, Saccharomyces pastorianus
tccttccgcaggttcacctacggaa

SEQ ID NO: 194067 - DNA, 25 bp, Saccharomyces pastorianus
atgatccttccgcaggttcacctac

SEQ ID NO: 194068 - DNA, 25 bp, Saccharomyces pastorianus
aatttctttaatgatccttccgcag

SEQ ID NO: 194069 - DNA, 25 bp, Saccharomyces pastorianus
tcacagacccttcggaaattccaga

SEQ ID NO: 194070 - DNA, 25 bp, Saccharomyces pastorianus
tggagttttactacccaccagtcaa

SEQ ID NO: 194071 - DNA, 25 bp, Saccharomyces pastorianus
ttttgacatttccaacctcacagac

SEQ ID NO: 194072 - DNA, 25 bp, Saccharomyces pastorianus
ggtcgtggcacgatgatcactctaa

SEQ ID NO: 194073 - DNA, 25 bp, Saccharomyces pastorianus
ctaaacgatcgtattgcctctgggt

SEQ ID NO: 194074 - DNA, 25 bp, Saccharomyces pastorianus
agatggtacagttcctccagatgat

SEQ ID NO: 194075 - DNA, 25 bp, Saccharomyces pastorianus
cagtgtctattgctgcttctgagaa

SEQ ID NO: 194076 - DNA, 25 bp, Saccharomyces pastorianus
gttcctggactgctacgggtagtat

SEQ ID NO: 194077 - DNA, 25 bp, Saccharomyces pastorianus
gtcattattctgtactcctatcaag

SEQ ID NO: 194078 - DNA, 25 bp, Saccharomyces pastorianus
aattatgtttgtactccggctacgg

SEQ ID NO: 194079 - DNA, 25 bp, Saccharomyces pastorianus
agatgatgccccagagtacgccatt

SEQ ID NO: 194080 - DNA, 25 bp, Saccharomyces pastorianus
atatgcgttggccaaggaacagcta

SEQ ID NO: 194081 - DNA, 25 bp, Saccharomyces pastorianus
ctggcttccggaatactatttctct

SEQ ID NO: 194082 - DNA, 25 bp, Saccharomyces pastorianus
atctctcattttctgttgtacagca

SEQ ID NO: 194083 - DNA, 25 bp, Saccharomyces pastorianus
gaagttccaatatgcgttggccaag

SEQ ID NO: 194084 - DNA, 25 bp, Saccharomyces pastorianus
gaatactatttctctgatctctcat

SEQ ID NO: 194085 - DNA, 25 bp, Saccharomyces pastorianus
atgcggcccgcaaaccaagagattt

SEQ ID NO: 194086 - DNA, 25 bp, Saccharomyces pastorianus
aatcatatcttgtatgcggcccgca

SEQ ID NO: 194087 - DNA, 25 bp, Saccharomyces pastorianus
taagtaaacaccactggcttccgga

SEQ ID NO: 194088 - DNA, 25 bp, Saccharomyces pastorianus
tacagcagtgggacagtagagccat

SEQ ID NO: 194089 - DNA, 25 bp, Saccharomyces pastorianus
ggaacagctaggcagcaactcgcgc

SEQ ID NO: 194090 - DNA, 25 bp, Saccharomyces pastorianus
gcaactcgcgcagtggcgtcaaaaa

SEQ ID NO: 194091 - DNA, 25 bp, Saccharomyces pastorianus
atctaagttacctgatacaagaact

SEQ ID NO: 194092 - DNA, 25 bp, Saccharomyces pastorianus
aaataatctaagttacctgatacaa

SEQ ID NO: 194093 - DNA, 25 bp, Saccharomyces pastorianus
ttattaaataatctaagttacctga

SEQ ID NO: 194094 - DNA, 25 bp, Saccharomyces pastorianus
taatctaagttacctgatacaagaa

SEQ ID NO: 194095 - DNA, 25 bp, Saccharomyces pastorianus
ataatctaagttacctgatacaaga

SEQ ID NO: 194096 - DNA, 25 bp, Saccharomyces pastorianus
tattaaataatctaagttacctgat

SEQ ID NO: 194097 - DNA, 25 bp, Saccharomyces pastorianus
aataatctaagttacctgatacaag

SEQ ID NO: 194098 - DNA, 25 bp, Saccharomyces pastorianus
ttaaataatctaagttacctgatac

SEQ ID NO: 194099 - DNA, 25 bp, Saccharomyces pastorianus
attaaataatctaagttacctgata

SEQ ID NO: 194100 - DNA, 25 bp, Saccharomyces pastorianus
taaataatctaagttacctgataca

SEQ ID NO: 194101 - DNA, 25 bp, Saccharomyces pastorianus
aatctaagttacctgatacaagaac

SEQ ID NO: 194102 - DNA, 25 bp, Saccharomyces pastorianus
gttttcatcactatatgcacgctct

SEQ ID NO: 194103 - DNA, 25 bp, Saccharomyces pastorianus
gagacattgtgagaccctccgttcg

SEQ ID NO: 194104 - DNA, 25 bp, Saccharomyces pastorianus
atgcacgctctttccaaagctcctg

SEQ ID NO: 194105 - DNA, 25 bp, Saccharomyces pastorianus
ttcgcaaccgtgctctctgttttca

SEQ ID NO: 194106 - DNA, 25 bp, Saccharomyces pastorianus
atcactatatgcacgctctttccaa

SEQ ID NO: 194107 - DNA, 25 bp, Saccharomyces pastorianus
tttgagacattgtgagaccctccgt

SEQ ID NO: 194108 - DNA, 25 bp, Saccharomyces pastorianus
aaagctcctgcactttgcacgtggc

SEQ ID NO: 194109 - DNA, 25 bp, Saccharomyces pastorianus
ttgtgagaccctccgttcgcaaccg

SEQ ID NO: 194110 - DNA, 25 bp, Saccharomyces pastorianus
gtgctctctgttttcatcactatat

SEQ ID NO: 194111 - DNA, 25 bp, Saccharomyces pastorianus
tgcactttgcacgtggcggagccat

SEQ ID NO: 194112 - DNA, 25 bp, Saccharomyces pastorianus
tatatgcacgctctttccaaagctc

SEQ ID NO: 194113 - DNA, 25 bp, Saccharomyces pastorianus
tctctgccagaacgctcgagcagcg

SEQ ID NO: 194114 - DNA, 25 bp, Saccharomyces pastorianus
tgacattgctatccgccggcaagca

SEQ ID NO: 194115 - DNA, 25 bp, Saccharomyces pastorianus
aaaatgacattgctatccgccggca

SEQ ID NO: 194116 - DNA, 25 bp, Saccharomyces pastorianus
gccagacagctgcgagactctcgtc

SEQ ID NO: 194117 - DNA, 25 bp, Saccharomyces pastorianus
ggttcgtcttcgttagtatgagccc

SEQ ID NO: 194118 - DNA, 25 bp, Saccharomyces pastorianus
actgtgtatcttttggttcgtcttc

SEQ ID NO: 194119 - DNA, 25 bp, Saccharomyces pastorianus
tatcttttggttcgtcttcgttagt

SEQ ID NO: 194120 - DNA, 25 bp, Saccharomyces pastorianus
tcgtcccgctactgtgtatcttttg

SEQ ID NO: 194121 - DNA, 25 bp, Saccharomyces pastorianus
gtcttcgttagtatgagcccgctcc

SEQ ID NO: 194122 - DNA, 25 bp, Saccharomyces pastorianus
cggctcgtgccaacaaatcagacaa

SEQ ID NO: 194123 - DNA, 25 bp, Saccharomyces pastorianus
gctactgtgtatcttttggttcgtc

SEQ ID NO: 194124 - DNA, 25 bp, Saccharomyces pastorianus
tatgagctggccaccaggacggaat

SEQ ID NO: 194125 - DNA, 25 bp, Saccharomyces pastorianus
gttgcagatcattagcgtcgcagaa

SEQ ID NO: 194126 - DNA, 25 bp, Saccharomyces pastorianus
ttactgtcacgttctgtacttggcg

SEQ ID NO: 194127 - DNA, 25 bp, Saccharomyces pastorianus
tcatgctgctggtgctttctattat

SEQ ID NO: 194128 - DNA, 25 bp, Saccharomyces pastorianus
aaacttcttcaccttcagcgatctg

SEQ ID NO: 194129 - DNA, 25 bp, Saccharomyces pastorianus
ttcgccggcggcaagctaatacgat

SEQ ID NO: 194130 - DNA, 25 bp, Saccharomyces pastorianus
ctgggtcccactgaagaaacacgct

SEQ ID NO: 194131 - DNA, 25 bp, Saccharomyces pastorianus
attatcgcgatctgggttctttact

SEQ ID NO: 194132 - DNA, 25 bp, Saccharomyces pastorianus
aagccaccgctactacagcagttta

SEQ ID NO: 194133 - DNA, 25 bp, Saccharomyces pastorianus
aaggagccatgcaccattctttctt

SEQ ID NO: 194134 - DNA, 25 bp, Saccharomyces pastorianus
acgaattcctggctacgttccagaa

SEQ ID NO: 194135 - DNA, 25 bp, Saccharomyces pastorianus
tgctaaacgttactacgaccaagtt

SEQ ID NO: 194136 - DNA, 25 bp, Saccharomyces pastorianus
gaagacttcatggtacaagcaattg

SEQ ID NO: 194137 - DNA, 25 bp, Saccharomyces pastorianus
gatcatagattttacttggcttcca

SEQ ID NO: 194138 - DNA, 25 bp, Saccharomyces pastorianus
cttggcttccaaattgagtgtttta

SEQ ID NO: 194139 - DNA, 25 bp, Saccharomyces pastorianus
gaccaagtttcagaacacgatcata

SEQ ID NO: 194140 - DNA, 25 bp, Saccharomyces pastorianus
agtactctatacaggctatctggaa

SEQ ID NO: 194141 - DNA, 25 bp, Saccharomyces pastorianus
ggaacttagggtacatgcatgagca

SEQ ID NO: 194142 - DNA, 25 bp, Saccharomyces pastorianus
gtcatggttgacttggatcaccaga

SEQ ID NO: 194143 - DNA, 25 bp, Saccharomyces pastorianus
gatactcagcactcgaagacttcat

SEQ ID NO: 194144 - DNA, 25 bp, Saccharomyces pastorianus
ctcgccacttaaccctaacgaagat

SEQ ID NO: 194145 - DNA, 25 bp, Saccharomyces pastorianus
gagatttccatcttgctaaacgtta

SEQ ID NO: 194146 - DNA, 25 bp, Saccharomyces pastorianus
tgttcccgaagtcattgttgcaaga

SEQ ID NO: 194147 - DNA, 25 bp, Saccharomyces pastorianus
caagacattgcggatggagggtttt

SEQ ID NO: 194148 - DNA, 25 bp, Saccharomyces pastorianus
gtgcgttggacgaatcacctgtacc

SEQ ID NO: 194149 - DNA, 25 bp, Saccharomyces pastorianus
agtactgttcccgaagtcattgttg

SEQ ID NO: 194150 - DNA, 25 bp, Saccharomyces pastorianus
gaatcacctgtacccttagaaaaag

SEQ ID NO: 194151 - DNA, 25 bp, Saccharomyces pastorianus
atagccctgccagtgcgttggacga

SEQ ID NO: 194152 - DNA, 25 bp, Saccharomyces pastorianus
aaaaggcaaagcgactcacgctgaa

SEQ ID NO: 194153 - DNA, 25 bp, Saccharomyces pastorianus
tcgaaacaagagcagaatccaaaat

SEQ ID NO: 194154 - DNA, 25 bp, Saccharomyces pastorianus
atacttgcgtggtggatagccctgc

SEQ ID NO: 194155 - DNA, 25 bp, Saccharomyces pastorianus
gcgactcacgctgaagtactggaga

SEQ ID NO: 194156 - DNA, 25 bp, Saccharomyces pastorianus
agtttgattaccaatacttgcgtgg

SEQ ID NO: 194157 - DNA, 25 bp, Saccharomyces pastorianus
aaccaaccatattacaagtcacaaa

SEQ ID NO: 194158 - DNA, 25 bp, Saccharomyces pastorianus
gtaaccaaccatattacaagtcaca

SEQ ID NO: 194159 - DNA, 25 bp, Saccharomyces pastorianus
tggtaaccaaccatattacaagtca

SEQ ID NO: 194160 - DNA, 25 bp, Saccharomyces pastorianus
atggtaaccaaccatattacaagtc

SEQ ID NO: 194161 - DNA, 25 bp, Saccharomyces pastorianus
tatggtaaccaaccatattacaagt

SEQ ID NO: 194162 - DNA, 25 bp, Saccharomyces pastorianus
accaaccatattacaagtcacaaat

SEQ ID NO: 194163 - DNA, 25 bp, Saccharomyces pastorianus
ggtaaccaaccatattacaagtcac

SEQ ID NO: 194164 - DNA, 25 bp, Saccharomyces pastorianus
taaccaaccatattacaagtcacaa

SEQ ID NO: 194165 - DNA, 25 bp, Saccharomyces pastorianus
gcggcgacttctgcatggtttgatg

SEQ ID NO: 194166 - DNA, 25 bp, Saccharomyces pastorianus
ttatggccgtactctgtgcatccgc

SEQ ID NO: 194167 - DNA, 25 bp, Saccharomyces pastorianus
caacatgcgtttacgcggcgcgctg

SEQ ID NO: 194168 - DNA, 25 bp, Saccharomyces pastorianus
ctatgcgtttggtagtcgcgcgtga

SEQ ID NO: 194169 - DNA, 25 bp, Saccharomyces pastorianus
ctggagcttctgtggcggcgacttc

SEQ ID NO: 194170 - DNA, 25 bp, Saccharomyces pastorianus
tttgcagccttatggccgtactctg

SEQ ID NO: 194171 - DNA, 25 bp, Saccharomyces pastorianus
atcggctctctgaaaccttccctat

SEQ ID NO: 194172 - DNA, 25 bp, Saccharomyces pastorianus
gggcgccttccaacatgcgtttacg

SEQ ID NO: 194173 - DNA, 25 bp, Saccharomyces pastorianus
gaaaccttccctatgcgtttggtag

SEQ ID NO: 194174 - DNA, 25 bp, Saccharomyces pastorianus
gtttgatgcagttgcggctggtact

SEQ ID NO: 194175 - DNA, 25 bp, Saccharomyces pastorianus
agtcgcgcgtgaatatgctaattgg

SEQ ID NO: 194176 - DNA, 25 bp, Saccharomyces pastorianus
aagacaatactccatcactaatgcc

SEQ ID NO: 194177 - DNA, 25 bp, Saccharomyces pastorianus
gaaaaagacaatactccatcactaa

SEQ ID NO: 194178 - DNA, 25 bp, Saccharomyces pastorianus
tgactccttcttctcgtttttgatc

SEQ ID NO: 194179 - DNA, 25 bp, Saccharomyces pastorianus
cttcttctcgtttttgatctccttt

SEQ ID NO: 194180 - DNA, 25 bp, Saccharomyces pastorianus
tcactaagggtgttaactggagagc

SEQ ID NO: 194181 - DNA, 25 bp, Saccharomyces pastorianus
tcaatttcttttacggtgactcctt

SEQ ID NO: 194182 - DNA, 25 bp, Saccharomyces pastorianus
caacactggtattgtcaatttcttt

SEQ ID NO: 194183 - DNA, 25 bp, Saccharomyces pastorianus
actcctatcatttctgtcatgattt

SEQ ID NO: 194184 - DNA, 25 bp, Saccharomyces pastorianus
ttcttttacggtgactccttcttct

SEQ ID NO: 194185 - DNA, 25 bp, Saccharomyces pastorianus
catttctgtcatgatttgcgataac

SEQ ID NO: 194186 - DNA, 25 bp, Saccharomyces pastorianus
tactatttcactaagggtgttaact

SEQ ID NO: 194187 - DNA, 25 bp, Saccharomyces pastorianus
cactagaggcgtcccgggcatgaat

SEQ ID NO: 194188 - DNA, 25 bp, Saccharomyces pastorianus
gatcagcaactggtaaagctgcaaa

SEQ ID NO: 194189 - DNA, 25 bp, Saccharomyces pastorianus
taaaacagttggaaagggaccatat

SEQ ID NO: 194190 - DNA, 25 bp, Saccharomyces pastorianus
atggattaagaaggaaactgtcggg

SEQ ID NO: 194191 - DNA, 25 bp, Saccharomyces pastorianus
ggcgtcccgggcatgaatcctaagg

SEQ ID NO: 194192 - DNA, 25 bp, Saccharomyces pastorianus
gcaactggtaaagctgcaaaatgga

SEQ ID NO: 194193 - DNA, 25 bp, Saccharomyces pastorianus
gaatacacgaacaaacttttagtgg

SEQ ID NO: 194194 - DNA, 25 bp, Saccharomyces pastorianus
aactaggttagaagtggaacgatat

SEQ ID NO: 194195 - DNA, 25 bp, Saccharomyces pastorianus
gacactagaggcgtcccgggcatga

SEQ ID NO: 194196 - DNA, 25 bp, Saccharomyces pastorianus
cgtcccgggcatgaatcctaagggt

SEQ ID NO: 194197 - DNA, 25 bp, Saccharomyces pastorianus
tggaaagggaccatatgtttttcaa

SEQ ID NO: 194198 - DNA, 25 bp, Saccharomyces pastorianus
gaatttgtggtcaaggactttccaa

SEQ ID NO: 194199 - DNA, 25 bp, Saccharomyces pastorianus
tcatgacaatgggagaactgctgcc

SEQ ID NO: 194200 - DNA, 25 bp, Saccharomyces pastorianus
tcgctcaggatggaaatgcatggtc

SEQ ID NO: 194201 - DNA, 25 bp, Saccharomyces pastorianus
taatggcaggccatcgctcaggatg

SEQ ID NO: 194202 - DNA, 25 bp, Saccharomyces pastorianus
atgcatggtcatttgtggcgattct

SEQ ID NO: 194203 - DNA, 25 bp, Saccharomyces pastorianus
gcggcgtttgcaggcagtttatcaa

SEQ ID NO: 194204 - DNA, 25 bp, Saccharomyces pastorianus
gattctgaggaccagtgtgtttccc

SEQ ID NO: 194205 - DNA, 25 bp, Saccharomyces pastorianus
aattccacaggttctcgttctaaag

SEQ ID NO: 194206 - DNA, 25 bp, Saccharomyces pastorianus
aatagtcatgcttaattccacaggt

SEQ ID NO: 194207 - DNA, 25 bp, Saccharomyces pastorianus
agtgtgtttccccttgcggcgtttg

SEQ ID NO: 194208 - DNA, 25 bp, Saccharomyces pastorianus
ggttctcgttctaaagtcatgacaa

SEQ ID NO: 194209 - DNA, 25 bp, Saccharomyces pastorianus
ggccacttttccaagcgattaactt

SEQ ID NO: 194210 - DNA, 25 bp, Saccharomyces pastorianus
actaattgggcagtttggccacttt

SEQ ID NO: 194211 - DNA, 25 bp, Saccharomyces pastorianus
agtttggccacttttccaagcgatt

SEQ ID NO: 194212 - DNA, 25 bp, Saccharomyces pastorianus
cttttccaagcgattaacttttctg

SEQ ID NO: 194213 - DNA, 25 bp, Saccharomyces pastorianus
taaaagagcaatggtggcctacact

SEQ ID NO: 194214 - DNA, 25 bp, Saccharomyces pastorianus
aaagagcaatggtggcctacacttt

SEQ ID NO: 194215 - DNA, 25 bp, Saccharomyces pastorianus
ataggttactagctgttaatgtcgt

SEQ ID NO: 194216 - DNA, 25 bp, Saccharomyces pastorianus
gtttgcgccgctaggtttgccattt

SEQ ID NO: 194217 - DNA, 25 bp, Saccharomyces pastorianus
gctgttaatgtcgttgcaatatttt

SEQ ID NO: 194218 - DNA, 25 bp, Saccharomyces pastorianus
taattgggcagtttggccacttttc

SEQ ID NO: 194219 - DNA, 25 bp, Saccharomyces pastorianus
tcctttacaacataggttactagct

SEQ ID NO: 194220 - DNA, 25 bp, Saccharomyces pastorianus
aatgaaagtttggaggcttcgcctg

SEQ ID NO: 194221 - DNA, 25 bp, Saccharomyces pastorianus
gatcttacgttatgcaactaaatga

SEQ ID NO: 194222 - DNA, 25 bp, Saccharomyces pastorianus
gtactttggagatcttacgttatgc

SEQ ID NO: 194223 - DNA, 25 bp, Saccharomyces pastorianus
gtttggacgtccttctacattaata

SEQ ID NO: 194224 - DNA, 25 bp, Saccharomyces pastorianus
ggacgtccttctacattaatagatt

SEQ ID NO: 194225 - DNA, 25 bp, Saccharomyces pastorianus
gaaaagtttggacgtccttctacat

SEQ ID NO: 194226 - DNA, 25 bp, Saccharomyces pastorianus
ggagatcttacgttatgcaactaaa

SEQ ID NO: 194227 - DNA, 25 bp, Saccharomyces pastorianus
ttcgcctgcaataaaaggtgaaaag

SEQ ID NO: 194228 - DNA, 25 bp, Saccharomyces pastorianus
gtccttctacattaatagattgtga

SEQ ID NO: 194229 - DNA, 25 bp, Saccharomyces pastorianus
aagacacagaacttgctgaattaga

SEQ ID NO: 194230 - DNA, 25 bp, Saccharomyces pastorianus
aagaataatatgataccaatggtaa

SEQ ID NO: 194231 - DNA, 25 bp, Saccharomyces pastorianus
aagagccttcatctctgtccatgga

SEQ ID NO: 194232 - DNA, 25 bp, Saccharomyces pastorianus
actccgttctagatgctttgaatag

SEQ ID NO: 194233 - DNA, 25 bp, Saccharomyces pastorianus
gccttcatctctgtccatggacaaa

SEQ ID NO: 194234 - DNA, 25 bp, Saccharomyces pastorianus
aataactccgttctagatgctttga

SEQ ID NO: 194235 - DNA, 25 bp, Saccharomyces pastorianus
acctggaccaataactccgttctag

SEQ ID NO: 194236 - DNA, 25 bp, Saccharomyces pastorianus
ctagatgctttgaatagcaagtcca

SEQ ID NO: 194237 - DNA, 25 bp, Saccharomyces pastorianus
tttccccagagtcaagagccttcat

SEQ ID NO: 194238 - DNA, 25 bp, Saccharomyces pastorianus
atatttccccagagtcaagagcctt

SEQ ID NO: 194239 - DNA, 25 bp, Saccharomyces pastorianus
tactacaaacaatatttccccagag

SEQ ID NO: 194240 - DNA, 25 bp, Saccharomyces pastorianus
agagtcaagagccttcatctctgtc

SEQ ID NO: 194241 - DNA, 25 bp, Saccharomyces pastorianus
tgtccatggacaaacagcagcaaca

SEQ ID NO: 194242 - DNA, 25 bp, Saccharomyces pastorianus
acacagatttttcgagggcaacagc

SEQ ID NO: 194243 - DNA, 25 bp, Saccharomyces pastorianus
gcagagtgaagtttatttttagcat

SEQ ID NO: 194244 - DNA, 25 bp, Saccharomyces pastorianus
gggcaacagcgtggacttaacataa

SEQ ID NO: 194245 - DNA, 25 bp, Saccharomyces pastorianus
atatatctttaaactggctccaccc

SEQ ID NO: 194246 - DNA, 25 bp, Saccharomyces pastorianus
tagcatccttgctgatacgccaaat

SEQ ID NO: 194247 - DNA, 25 bp, Saccharomyces pastorianus
ggtacgtaatgcctcattaggattt

SEQ ID NO: 194248 - DNA, 25 bp, Saccharomyces pastorianus
taacaacattttttgacggagagtt

SEQ ID NO: 194249 - DNA, 25 bp, Saccharomyces pastorianus
gtttcatatctatatataccgcaga

SEQ ID NO: 194250 - DNA, 25 bp, Saccharomyces pastorianus
aattcactatactaacatggtcatt

SEQ ID NO: 194251 - DNA, 25 bp, Saccharomyces pastorianus
aaaacgtaattgcttgacacagatt

SEQ ID NO: 194252 - DNA, 25 bp, Saccharomyces pastorianus
aaaaatggacgtttcagcgaggaat

SEQ ID NO: 194253 - DNA, 25 bp, Saccharomyces pastorianus
gcattaactacgctcttgggaaata

SEQ ID NO: 194254 - DNA, 25 bp, Saccharomyces pastorianus
aactacgctcttgggaaatacttct

SEQ ID NO: 194255 - DNA, 25 bp, Saccharomyces pastorianus
gtatagcattaactacgctcttggg

SEQ ID NO: 194256 - DNA, 25 bp, Saccharomyces pastorianus
cgctcttgggaaatacttctttcat

SEQ ID NO: 194257 - DNA, 25 bp, Saccharomyces pastorianus
cctgacattgcgtatagcattaact

SEQ ID NO: 194258 - DNA, 25 bp, Saccharomyces pastorianus
attaactacgctcttgggaaatact

SEQ ID NO: 194259 - DNA, 25 bp, Saccharomyces pastorianus
ctacgctcttgggaaatacttcttt

SEQ ID NO: 194260 - DNA, 25 bp, Saccharomyces pastorianus
cattctcccctgacattgcgtatag

SEQ ID NO: 194261 - DNA, 25 bp, Saccharomyces pastorianus
atagcattaactacgctcttgggaa

SEQ ID NO: 194262 - DNA, 25 bp, Saccharomyces pastorianus
tcccctgacattgcgtatagcatta

SEQ ID NO: 194263 - DNA, 25 bp, Saccharomyces pastorianus
tctcccctgacattgcgtatagcat

SEQ ID NO: 194264 - DNA, 25 bp, Saccharomyces pastorianus
gaccccagcgtatctggactttgaa

SEQ ID NO: 194265 - DNA, 25 bp, Saccharomyces pastorianus
gggtcacaagacaattaggaatcta

SEQ ID NO: 194266 - DNA, 25 bp, Saccharomyces pastorianus
gtccgcacgtggaggccataattga

SEQ ID NO: 194267 - DNA, 25 bp, Saccharomyces pastorianus
ctatgttaggaagcggtctcccctg

SEQ ID NO: 194268 - DNA, 25 bp, Saccharomyces pastorianus
gctgcactatatatgaaggcgctaa

SEQ ID NO: 194269 - DNA, 25 bp, Saccharomyces pastorianus
gtctcccctgctttaagggtcacaa

SEQ ID NO: 194270 - DNA, 25 bp, Saccharomyces pastorianus
gccataattgagtgtgtaaatccta

SEQ ID NO: 194271 - DNA, 25 bp, Saccharomyces pastorianus
tatcaaggcatatctagccgcccgt

SEQ ID NO: 194272 - DNA, 25 bp, Saccharomyces pastorianus
aaaaccgatcacgaagctgcactat

SEQ ID NO: 194273 - DNA, 25 bp, Saccharomyces pastorianus
tctggactttgaagaactttgtatc

SEQ ID NO: 194274 - DNA, 25 bp, Saccharomyces pastorianus
ctaagagcaagatttcaacctcaaa

SEQ ID NO: 194275 - DNA, 25 bp, Saccharomyces pastorianus
caaagttactgtgtgagggtgagaa

SEQ ID NO: 194276 - DNA, 25 bp, Saccharomyces pastorianus
atttgctgaagctgtgagattgacc

SEQ ID NO: 194277 - DNA, 25 bp, Saccharomyces pastorianus
gacccgttaaacaaggatgcagcaa

SEQ ID NO: 194278 - DNA, 25 bp, Saccharomyces pastorianus
gcagagtattataaccgggcttctt

SEQ ID NO: 194279 - DNA, 25 bp, Saccharomyces pastorianus
attcttggctttattcaaatagttg

SEQ ID NO: 194280 - DNA, 25 bp, Saccharomyces pastorianus
caaggatgcagcaaagttactgtgt

SEQ ID NO: 194281 - DNA, 25 bp, Saccharomyces pastorianus
ttcttgttcttggagcctaatccca

SEQ ID NO: 194282 - DNA, 25 bp, Saccharomyces pastorianus
gagcctaatcccaatgacccgttaa

SEQ ID NO: 194283 - DNA, 25 bp, Saccharomyces pastorianus
gtactggatatgtatattcttggct

SEQ ID NO: 194284 - DNA, 25 bp, Saccharomyces pastorianus
gaccatgtctggaggttcaattgaa

SEQ ID NO: 194285 - DNA, 25 bp, Saccharomyces pastorianus
gaagctgtgagattgaccatgtctg

SEQ ID NO: 194286 - DNA, 25 bp, Saccharomyces pastorianus
taacgtatgctatccatctcttttc

SEQ ID NO: 194287 - DNA, 25 bp, Saccharomyces pastorianus
aaacgactgcttagtaggagtgtca

SEQ ID NO: 194288 - DNA, 25 bp, Saccharomyces pastorianus
attcttcgaagcttttatgagttaa

SEQ ID NO: 194289 - DNA, 25 bp, Saccharomyces pastorianus
gtcatatatccctcctttaaatttt

SEQ ID NO: 194290 - DNA, 25 bp, Saccharomyces pastorianus
atgctatccatctcttttccttttt

SEQ ID NO: 194291 - DNA, 25 bp, Saccharomyces pastorianus
ctgcttagtaggagtgtcatatatc

SEQ ID NO: 194292 - DNA, 25 bp, Saccharomyces pastorianus
tagaaaaggtgcatctctctctctc

SEQ ID NO: 194293 - DNA, 25 bp, Saccharomyces pastorianus
tctctatctctatctctaaggtttt

SEQ ID NO: 194294 - DNA, 25 bp, Saccharomyces pastorianus
tactcagttagattcatactactat

SEQ ID NO: 194295 - DNA, 25 bp, Saccharomyces pastorianus
ggttttattactttcataacgtatg

SEQ ID NO: 194296 - DNA, 25 bp, Saccharomyces pastorianus
atttacatattcttcgaagctttta

SEQ ID NO: 194297 - DNA, 25 bp, Saccharomyces pastorianus
gcacgcgatagctcatttcgtactt

SEQ ID NO: 194298 - DNA, 25 bp, Saccharomyces pastorianus
agtcgttcaatatttgatcattggg

SEQ ID NO: 194299 - DNA, 25 bp, Saccharomyces pastorianus
atcttcacagacaacgtcgacgcac

SEQ ID NO: 194300 - DNA, 25 bp, Saccharomyces pastorianus
gcatgtctattttatagtcgttcaa

SEQ ID NO: 194301 - DNA, 25 bp, Saccharomyces pastorianus
ttgccatcttcacagacaacgtcga

SEQ ID NO: 194302 - DNA, 25 bp, Saccharomyces pastorianus
gacgcacgcgatagctcatttcgta

SEQ ID NO: 194303 - DNA, 25 bp, Saccharomyces pastorianus
atagctcatttcgtacttcctgcat

SEQ ID NO: 194304 - DNA, 25 bp, Saccharomyces pastorianus
gtacttcctgcatgtctattttata

SEQ ID NO: 194305 - DNA, 25 bp, Saccharomyces pastorianus
acagacaacgtcgacgcacgcgata

SEQ ID NO: 194306 - DNA, 25 bp, Saccharomyces pastorianus
atttcgtacttcctgcatgtctatt

SEQ ID NO: 194307 - DNA, 25 bp, Saccharomyces pastorianus
ctgccgttgccatcttcacagacaa

SEQ ID NO: 194308 - DNA, 25 bp, Saccharomyces pastorianus
aaaatatcgcccaactgcggagcgc

SEQ ID NO: 194309 - DNA, 25 bp, Saccharomyces pastorianus
tagagggtcctttactactgacggt

SEQ ID NO: 194310 - DNA, 25 bp, Saccharomyces pastorianus
tggagcacctgccatttcaacaatt

SEQ ID NO: 194311 - DNA, 25 bp, Saccharomyces pastorianus
gggcacttctatcattggtctcagc

SEQ ID NO: 194312 - DNA, 25 bp, Saccharomyces pastorianus
acggttgtgcgctttttagtcgtat

SEQ ID NO: 194313 - DNA, 25 bp, Saccharomyces pastorianus
catcacagattttgccggtttagga

SEQ ID NO: 194314 - DNA, 25 bp, Saccharomyces pastorianus
tggtaggcttcttcaacaaacggtt

SEQ ID NO: 194315 - DNA, 25 bp, Saccharomyces pastorianus
tggtctcagctttctttagtttcat

SEQ ID NO: 194316 - DNA, 25 bp, Saccharomyces pastorianus
tttaacttcggtatacctccagcta

SEQ ID NO: 194317 - DNA, 25 bp, Saccharomyces pastorianus
gtaccagaacttcctgaggccgatg

SEQ ID NO: 194318 - DNA, 25 bp, Saccharomyces pastorianus
aggagcactaccacctaatgctggt

SEQ ID NO: 194319 - DNA, 25 bp, Saccharomyces pastorianus
tagccgtatcttaccttatggaaaa

SEQ ID NO: 194320 - DNA, 25 bp, Saccharomyces pastorianus
gagcttcccggaaattacactatat

SEQ ID NO: 194321 - DNA, 25 bp, Saccharomyces pastorianus
aaattacactatattatgcatccgt

SEQ ID NO: 194322 - DNA, 25 bp, Saccharomyces pastorianus
ggtaagatttgttgaaactcgaaat

SEQ ID NO: 194323 - DNA, 25 bp, Saccharomyces pastorianus
ttgaaactcgaaatactaacattat

SEQ ID NO: 194324 - DNA, 25 bp, Saccharomyces pastorianus
atgtttttctaaatcgagcttcccg

SEQ ID NO: 194325 - DNA, 25 bp, Saccharomyces pastorianus
tgttcaatttatctagccgtatctt

SEQ ID NO: 194326 - DNA, 25 bp, Saccharomyces pastorianus
aagtctcacgacatgaaaaaatcat

SEQ ID NO: 194327 - DNA, 25 bp, Saccharomyces pastorianus
ttctaaatcgagcttcccggaaatt

SEQ ID NO: 194328 - DNA, 25 bp, Saccharomyces pastorianus
tatctagccgtatcttaccttatgg

SEQ ID NO: 194329 - DNA, 25 bp, Saccharomyces pastorianus
ttattgttcaatttatctagccgta

SEQ ID NO: 194330 - DNA, 25 bp, Saccharomyces pastorianus
gaatccattactctcaagttctcaa

SEQ ID NO: 194331 - DNA, 25 bp, Saccharomyces pastorianus
gagacaggccaaaaaaaattcggat

SEQ ID NO: 194332 - DNA, 25 bp, Saccharomyces pastorianus
gggaatccattactctcaagttctc

SEQ ID NO: 194333 - DNA, 25 bp, Saccharomyces pastorianus
gagggaatccattactctcaagttc

SEQ ID NO: 194334 - DNA, 25 bp, Saccharomyces pastorianus
gatcaacagataatggacaaatttc

SEQ ID NO: 194335 - DNA, 25 bp, Saccharomyces pastorianus
ggaatccattactctcaagttctca

SEQ ID NO: 194336 - DNA, 25 bp, Saccharomyces pastorianus
aaacgaggagggaatccattactct

SEQ ID NO: 194337 - DNA, 25 bp, Saccharomyces pastorianus
acgaggagggaatccattactctca

SEQ ID NO: 194338 - DNA, 25 bp, Saccharomyces pastorianus
gaggagggaatccattactctcaag

SEQ ID NO: 194339 - DNA, 25 bp, Saccharomyces pastorianus
agggaatccattactctcaagttct

SEQ ID NO: 194340 - DNA, 25 bp, Saccharomyces pastorianus
ggagggaatccattactctcaagtt

SEQ ID NO: 194341 - DNA, 25 bp, Saccharomyces pastorianus
ccagctttattggacaagttgatga

SEQ ID NO: 194342 - DNA, 25 bp, Saccharomyces pastorianus
tggaccctgtctccgctaagaagga

SEQ ID NO: 194343 - DNA, 25 bp, Saccharomyces pastorianus
cttgaatgaagacgctatggccact

SEQ ID NO: 194344 - DNA, 25 bp, Saccharomyces pastorianus
aacaatttctccagctttattggac

SEQ ID NO: 194345 - DNA, 25 bp, Saccharomyces pastorianus
tctctgccgatattgttactctatt

SEQ ID NO: 194346 - DNA, 25 bp, Saccharomyces pastorianus
tgaagacgctatggccactgaaaaa

SEQ ID NO: 194347 - DNA, 25 bp, Saccharomyces pastorianus
gacaagatttcttacatcagcgacg

SEQ ID NO: 194348 - DNA, 25 bp, Saccharomyces pastorianus
ttacatcagcgacgaatctaaattc

SEQ ID NO: 194349 - DNA, 25 bp, Saccharomyces pastorianus
ggaagccggcgacaagatttcttac

SEQ ID NO: 194350 - DNA, 25 bp, Saccharomyces pastorianus
agaaaattctctgccgatattgtta

SEQ ID NO: 194351 - DNA, 25 bp, Saccharomyces pastorianus
ttcccaagagttttggaccctgtct

SEQ ID NO: 194352 - DNA, 25 bp, Saccharomyces pastorianus
ggttcacttccaagaaacgaacagg

SEQ ID NO: 194353 - DNA, 25 bp, Saccharomyces pastorianus
atatttccagttatccgccagctgg

SEQ ID NO: 194354 - DNA, 25 bp, Saccharomyces pastorianus
gagaattgcgttccaaaaagttgtt

SEQ ID NO: 194355 - DNA, 25 bp, Saccharomyces pastorianus
tgaagcaaaaggcactcttgaggag

SEQ ID NO: 194356 - DNA, 25 bp, Saccharomyces pastorianus
gatcaaatctcatccatatttccag

SEQ ID NO: 194357 - DNA, 25 bp, Saccharomyces pastorianus
tcgtttttgatattggttcacttcc

SEQ ID NO: 194358 - DNA, 25 bp, Saccharomyces pastorianus
gtagcagaaacttaccaacgatagt

SEQ ID NO: 194359 - DNA, 25 bp, Saccharomyces pastorianus
gaatgtacaggacaaagttttcgtt

SEQ ID NO: 194360 - DNA, 25 bp, Saccharomyces pastorianus
gggtactgagagtcaattgcataga

SEQ ID NO: 194361 - DNA, 25 bp, Saccharomyces pastorianus
tggtgccccgactgcgtctatgcta

SEQ ID NO: 194362 - DNA, 25 bp, Saccharomyces pastorianus
gcgtctatgctaattccatttggaa

SEQ ID NO: 194363 - DNA, 25 bp, Saccharomyces pastorianus
ggtcatcgagcaatcaaagcttttc

SEQ ID NO: 194364 - DNA, 25 bp, Saccharomyces pastorianus
ttggtcatcgagcaatcaaagcttt

SEQ ID NO: 194365 - DNA, 25 bp, Saccharomyces pastorianus
gagcaatcaaagcttttcttcaaag

SEQ ID NO: 194366 - DNA, 25 bp, Saccharomyces pastorianus
tggtcatcgagcaatcaaagctttt

SEQ ID NO: 194367 - DNA, 25 bp, Saccharomyces pastorianus
gtcatcgagcaatcaaagcttttct

SEQ ID NO: 194368 - DNA, 25 bp, Saccharomyces pastorianus
catcgagcaatcaaagcttttcttc

SEQ ID NO: 194369 - DNA, 25 bp, Saccharomyces pastorianus
gttggtcatcgagcaatcaaagctt

SEQ ID NO: 194370 - DNA, 25 bp, Saccharomyces pastorianus
aaaattctccctgttggtcatcgag

SEQ ID NO: 194371 - DNA, 25 bp, Saccharomyces pastorianus
gcaatcaaagcttttcttcaaagaa

SEQ ID NO: 194372 - DNA, 25 bp, Saccharomyces pastorianus
tcgagcaatcaaagcttttcttcaa

SEQ ID NO: 194373 - DNA, 25 bp, Saccharomyces pastorianus
caatcaaagcttttcttcaaagaaa

SEQ ID NO: 194374 - DNA, 25 bp, Saccharomyces pastorianus
aaaggaaggtcatcctatcgcggaa

SEQ ID NO: 194375 - DNA, 25 bp, Saccharomyces pastorianus
gtcaaaagactggttaacgaaactg

SEQ ID NO: 194376 - DNA, 25 bp, Saccharomyces pastorianus
tcgcggaagggttagtcaaaagact

SEQ ID NO: 194377 - DNA, 25 bp, Saccharomyces pastorianus
actgatgtggctgcgattaccttac

SEQ ID NO: 194378 - DNA, 25 bp, Saccharomyces pastorianus
catcctatcgcggaagggttagtca

SEQ ID NO: 194379 - DNA, 25 bp, Saccharomyces pastorianus
aaactgatgtggctgcgattacctt

SEQ ID NO: 194380 - DNA, 25 bp, Saccharomyces pastorianus
tcctatcgcggaagggttagtcaaa

SEQ ID NO: 194381 - DNA, 25 bp, Saccharomyces pastorianus
aggtcatcctatcgcggaagggtta

SEQ ID NO: 194382 - DNA, 25 bp, Saccharomyces pastorianus
gaaggtcatcctatcgcggaagggt

SEQ ID NO: 194383 - DNA, 25 bp, Saccharomyces pastorianus
taacgaaactgatgtggctgcgatt

SEQ ID NO: 194384 - DNA, 25 bp, Saccharomyces pastorianus
acgaaactgatgtggctgcgattac

SEQ ID NO: 194385 - DNA, 25 bp, Saccharomyces pastorianus
catcccgtgtactattacccgacag

SEQ ID NO: 194386 - DNA, 25 bp, Saccharomyces pastorianus
gcttgtcggcattaagtctcttcat

SEQ ID NO: 194387 - DNA, 25 bp, Saccharomyces pastorianus
gcacgggctttctgtatattgaact

SEQ ID NO: 194388 - DNA, 25 bp, Saccharomyces pastorianus
gcttttcggagctacaattccccta

SEQ ID NO: 194389 - DNA, 25 bp, Saccharomyces pastorianus
gcattaagtctcttcatcccgtgta

SEQ ID NO: 194390 - DNA, 25 bp, Saccharomyces pastorianus
tgtatattgaactttccgtcgcttt

SEQ ID NO: 194391 - DNA, 25 bp, Saccharomyces pastorianus
ggtgcacgggctttctgtatattga

SEQ ID NO: 194392 - DNA, 25 bp, Saccharomyces pastorianus
aagtctcttcatcccgtgtactatt

SEQ ID NO: 194393 - DNA, 25 bp, Saccharomyces pastorianus
atattgaactttccgtcgcttttcg

SEQ ID NO: 194394 - DNA, 25 bp, Saccharomyces pastorianus
tacccggcttgtcggcattaagtct

SEQ ID NO: 194395 - DNA, 25 bp, Saccharomyces pastorianus
tttccgtcgcttttcggagctacaa

SEQ ID NO: 194396 - DNA, 25 bp, Saccharomyces pastorianus
aaccaaccatattacaagtcacaaa

SEQ ID NO: 194397 - DNA, 25 bp, Saccharomyces pastorianus
gtaaccaaccatattacaagtcaca

SEQ ID NO: 194398 - DNA, 25 bp, Saccharomyces pastorianus
tggtaaccaaccatattacaagtca

SEQ ID NO: 194399 - DNA, 25 bp, Saccharomyces pastorianus
atggtaaccaaccatattacaagtc

SEQ ID NO: 194400 - DNA, 25 bp, Saccharomyces pastorianus
tatggtaaccaaccatattacaagt

SEQ ID NO: 194401 - DNA, 25 bp, Saccharomyces pastorianus
accaaccatattacaagtcacaaat

SEQ ID NO: 194402 - DNA, 25 bp, Saccharomyces pastorianus
ggtaaccaaccatattacaagtcac

SEQ ID NO: 194403 - DNA, 25 bp, Saccharomyces pastorianus
taaccaaccatattacaagtcacaa

SEQ ID NO: 194404 - DNA, 25 bp, Saccharomyces pastorianus
agaaggtcctatcatgctgtacatt

SEQ ID NO: 194405 - DNA, 25 bp, Saccharomyces pastorianus
tcgccagaggagtacgttgtcaaat

SEQ ID NO: 194406 - DNA, 25 bp, Saccharomyces pastorianus
atcagcccagggtacagtgagttat

SEQ ID NO: 194407 - DNA, 25 bp, Saccharomyces pastorianus
ctgttttgcgcttgtggtggtagct

SEQ ID NO: 194408 - DNA, 25 bp, Saccharomyces pastorianus
gaacgagccagaagacgacctgtta

SEQ ID NO: 194409 - DNA, 25 bp, Saccharomyces pastorianus
aaatttgctggttcttgcatcggct

SEQ ID NO: 194410 - DNA, 25 bp, Saccharomyces pastorianus
ggtggtagctcaatggcttactcgt

SEQ ID NO: 194411 - DNA, 25 bp, Saccharomyces pastorianus
aacgccagtggatttgtacccaact

SEQ ID NO: 194412 - DNA, 25 bp, Saccharomyces pastorianus
aacctctaggctcattgggtgctaa

SEQ ID NO: 194413 - DNA, 25 bp, Saccharomyces pastorianus
ataggtgctatcgttggtcgtttca

SEQ ID NO: 194414 - DNA, 25 bp, Saccharomyces pastorianus
gcatttagctagttactcgccagag

SEQ ID NO: 194415 - DNA, 25 bp, Saccharomyces pastorianus
cccaccgtgcctcagctgagaaggt

SEQ ID NO: 194416 - DNA, 25 bp, Saccharomyces pastorianus
ttctcgaaacgaaggcaaggcaaaa

SEQ ID NO: 194417 - DNA, 25 bp, Saccharomyces pastorianus
atggacactattacaaaccccaccg

SEQ ID NO: 194418 - DNA, 25 bp, Saccharomyces pastorianus
gcatttgtgccagaatggacactat

SEQ ID NO: 194419 - DNA, 25 bp, Saccharomyces pastorianus
tgccagaatggacactattacaaac

SEQ ID NO: 194420 - DNA, 25 bp, Saccharomyces pastorianus
gtgcctcagctgagaaggtccctta

SEQ ID NO: 194421 - DNA, 25 bp, Saccharomyces pastorianus
atgcatttgtgccagaatggacact

SEQ ID NO: 194422 - DNA, 25 bp, Saccharomyces pastorianus
tcagctgagaaggtcccttacctaa

SEQ ID NO: 194423 - DNA, 25 bp, Saccharomyces pastorianus
ggacactattacaaaccccaccgtg

SEQ ID NO: 194424 - DNA, 25 bp, Saccharomyces pastorianus
agaattctcgaaacgaaggcaaggc

SEQ ID NO: 194425 - DNA, 25 bp, Saccharomyces pastorianus
agctgagaaggtcccttacctaaag

SEQ ID NO: 194426 - DNA, 25 bp, Saccharomyces pastorianus
gaacatactatcgtcacagcgacca

SEQ ID NO: 194427 - DNA, 25 bp, Saccharomyces pastorianus
agcaccgaagtttaagtcctgccaa

SEQ ID NO: 194428 - DNA, 25 bp, Saccharomyces pastorianus
agcgaccacacttatggctggcaaa

SEQ ID NO: 194429 - DNA, 25 bp, Saccharomyces pastorianus
ttcattacttgcagactaacgctcc

SEQ ID NO: 194430 - DNA, 25 bp, Saccharomyces pastorianus
gtcctgccaaatactcaccgatttt

SEQ ID NO: 194431 - DNA, 25 bp, Saccharomyces pastorianus
aagggatgtcgttgtttccctgtat

SEQ ID NO: 194432 - DNA, 25 bp, Saccharomyces pastorianus
ccatgctcctttggatttaactgag

SEQ ID NO: 194433 - DNA, 25 bp, Saccharomyces pastorianus
gatggttttgcaacattcattccaa

SEQ ID NO: 194434 - DNA, 25 bp, Saccharomyces pastorianus
ggtcacaccatctgatatagactat

SEQ ID NO: 194435 - DNA, 25 bp, Saccharomyces pastorianus
aaaaccctggatcaattccttctct

SEQ ID NO: 194436 - DNA, 25 bp, Saccharomyces pastorianus
ggaggattttcctgcgacgtaccaa

SEQ ID NO: 194437 - DNA, 25 bp, Saccharomyces pastorianus
gcataatcacatccttcttcttaat

SEQ ID NO: 194438 - DNA, 25 bp, Saccharomyces pastorianus
tgctactaagtagacgttccgtggt

SEQ ID NO: 194439 - DNA, 25 bp, Saccharomyces pastorianus
attgggctttatttcctgttggata

SEQ ID NO: 194440 - DNA, 25 bp, Saccharomyces pastorianus
agcacaatctttagcgtcatcctta

SEQ ID NO: 194441 - DNA, 25 bp, Saccharomyces pastorianus
atggatttccggtcgattgtttaca

SEQ ID NO: 194442 - DNA, 25 bp, Saccharomyces pastorianus
ggctcttctccattttatggcctaa

SEQ ID NO: 194443 - DNA, 25 bp, Saccharomyces pastorianus
acatgtatgtcccagcagtgaaagc

SEQ ID NO: 194444 - DNA, 25 bp, Saccharomyces pastorianus
gatgtcattatttctggctcttctc

SEQ ID NO: 194445 - DNA, 25 bp, Saccharomyces pastorianus
gtagcaagtcacacgctgttcaaaa

SEQ ID NO: 194446 - DNA, 25 bp, Saccharomyces pastorianus
ggctcggactttaaaccttatatgg

SEQ ID NO: 194447 - DNA, 25 bp, Saccharomyces pastorianus
gtccttgtatttctctgcattgcat

SEQ ID NO: 194448 - DNA, 25 bp, Saccharomyces pastorianus
gtgatttacatcacgatatgtcaat

SEQ ID NO: 194449 - DNA, 25 bp, Saccharomyces pastorianus
catgcccaccatcaattgtgcaaga

SEQ ID NO: 194450 - DNA, 25 bp, Saccharomyces pastorianus
gccatgcccaccatcaattgtgcaa

SEQ ID NO: 194451 - DNA, 25 bp, Saccharomyces pastorianus
gtgctgaatcagcacacgccatgcc

SEQ ID NO: 194452 - DNA, 25 bp, Saccharomyces pastorianus
aaaccttgtgctgaatcagcacacg

SEQ ID NO: 194453 - DNA, 25 bp, Saccharomyces pastorianus
agtaaacgagtagtatactaactat

SEQ ID NO: 194454 - DNA, 25 bp, Saccharomyces pastorianus
atactaactatatatgtgatttaca

SEQ ID NO: 194455 - DNA, 25 bp, Saccharomyces pastorianus
atgcccaccatcaattgtgcaagaa

SEQ ID NO: 194456 - DNA, 25 bp, Saccharomyces pastorianus
gcccaccatcaattgtgcaagaaaa

SEQ ID NO: 194457 - DNA, 25 bp, Saccharomyces pastorianus
acatcacgatatgtcaattataggc

SEQ ID NO: 194458 - DNA, 25 bp, Saccharomyces pastorianus
gatttacatcacgatatgtcaatta

SEQ ID NO: 194459 - DNA, 25 bp, Saccharomyces pastorianus
ggaaacattactttaccagccgact

SEQ ID NO: 194460 - DNA, 25 bp, Saccharomyces pastorianus
aagattaatgatggacaaattcgcc

SEQ ID NO: 194461 - DNA, 25 bp, Saccharomyces pastorianus
gttcctcatatcctaaaagacatca

SEQ ID NO: 194462 - DNA, 25 bp, Saccharomyces pastorianus
gacaaattcgccatattccagtaag

SEQ ID NO: 194463 - DNA, 25 bp, Saccharomyces pastorianus
acaggatgctacaattgttgaatta

SEQ ID NO: 194464 - DNA, 25 bp, Saccharomyces pastorianus
ggctatattcaataggtggccatga

SEQ ID NO: 194465 - DNA, 25 bp, Saccharomyces pastorianus
attactttaccagccgactcagaag

SEQ ID NO: 194466 - DNA, 25 bp, Saccharomyces pastorianus
ttaccagccgactcagaagctagga

SEQ ID NO: 194467 - DNA, 25 bp, Saccharomyces pastorianus
gctttgtgatgttcctcatatccta

SEQ ID NO: 194468 - DNA, 25 bp, Saccharomyces pastorianus
aacgggctttgtgatgttcctcata

SEQ ID NO: 194469 - DNA, 25 bp, Saccharomyces pastorianus
gactcagaagctaggaaagctgcaa

SEQ ID NO: 194470 - DNA, 25 bp, Saccharomyces pastorianus
tcacttggcccaatactacatgttc

SEQ ID NO: 194471 - DNA, 25 bp, Saccharomyces pastorianus
ttccgcaaccaccactatagctcaa

SEQ ID NO: 194472 - DNA, 25 bp, Saccharomyces pastorianus
aagccagctatctccaaggctctat

SEQ ID NO: 194473 - DNA, 25 bp, Saccharomyces pastorianus
gccagctatctccaaggctctatcc

SEQ ID NO: 194474 - DNA, 25 bp, Saccharomyces pastorianus
tgcttccgcaaccaccactatagct

SEQ ID NO: 194475 - DNA, 25 bp, Saccharomyces pastorianus
gcttccgcaaccaccactatagctc

SEQ ID NO: 194476 - DNA, 25 bp, Saccharomyces pastorianus
aaagccagctatctccaaggctcta

SEQ ID NO: 194477 - DNA, 25 bp, Saccharomyces pastorianus
agccagctatctccaaggctctatc

SEQ ID NO: 194478 - DNA, 25 bp, Saccharomyces pastorianus
cgccgctggtgtcgctgccatcgct

SEQ ID NO: 194479 - DNA, 25 bp, Saccharomyces pastorianus
gtactccagcagattaaagccagct

SEQ ID NO: 194480 - DNA, 25 bp, Saccharomyces pastorianus
agtgaccagaatgatcaccggtgtt

SEQ ID NO: 194481 - DNA, 25 bp, Saccharomyces pastorianus
aagggtatcgtaatcctttctattg

SEQ ID NO: 194482 - DNA, 25 bp, Saccharomyces pastorianus
catctacgtgtaggctgccaaattg

SEQ ID NO: 194483 - DNA, 25 bp, Saccharomyces pastorianus
tctacgtgtaggctgccaaattgta

SEQ ID NO: 194484 - DNA, 25 bp, Saccharomyces pastorianus
tcatctacgtgtaggctgccaaatt

SEQ ID NO: 194485 - DNA, 25 bp, Saccharomyces pastorianus
ctacgtgtaggctgccaaattgtac

SEQ ID NO: 194486 - DNA, 25 bp, Saccharomyces pastorianus
tacgtgtaggctgccaaattgtacc

SEQ ID NO: 194487 - DNA, 25 bp, Saccharomyces pastorianus
atctacgtgtaggctgccaaattgt

SEQ ID NO: 194488 - DNA, 25 bp, Saccharomyces pastorianus
ctcatctacgtgtaggctgccaaat

SEQ ID NO: 194489 - DNA, 25 bp, Saccharomyces pastorianus
gctggcatatggaagcagttgttca

SEQ ID NO: 194490 - DNA, 25 bp, Saccharomyces pastorianus
tggcatatggaagcagttgttcaac

SEQ ID NO: 194491 - DNA, 25 bp, Saccharomyces pastorianus
aggctggcatatggaagcagttgtt

SEQ ID NO: 194492 - DNA, 25 bp, Saccharomyces pastorianus
cgcaaaatgaggctggcatatggaa

SEQ ID NO: 194493 - DNA, 25 bp, Saccharomyces pastorianus
tacgcaaaatgaggctggcatatgg

SEQ ID NO: 194494 - DNA, 25 bp, Saccharomyces pastorianus
caaaatgaggctggcatatggaagc

SEQ ID NO: 194495 - DNA, 25 bp, Saccharomyces pastorianus
ggctggcatatggaagcagttgttc

SEQ ID NO: 194496 - DNA, 25 bp, Saccharomyces pastorianus
aatgaggctggcatatggaagcagt

SEQ ID NO: 194497 - DNA, 25 bp, Saccharomyces pastorianus
caactctccccaaagttttccacat

SEQ ID NO: 194498 - DNA, 25 bp, Saccharomyces pastorianus
ttacgcaaaatgaggctggcatatg

SEQ ID NO: 194499 - DNA, 25 bp, Saccharomyces pastorianus
atgaggctggcatatggaagcagtt

SEQ ID NO: 194500 - DNA, 25 bp, Saccharomyces pastorianus
atctgtcgatagattcttttcagca

SEQ ID NO: 194501 - DNA, 25 bp, Saccharomyces pastorianus
gctcgattaacacagcttggccaat

SEQ ID NO: 194502 - DNA, 25 bp, Saccharomyces pastorianus
gcttggccaattgttttcgagttac

SEQ ID NO: 194503 - DNA, 25 bp, Saccharomyces pastorianus
ggtctaggcttactacacatttcaa

SEQ ID NO: 194504 - DNA, 25 bp, Saccharomyces pastorianus
aagaccgttgttattcaatggaaga

SEQ ID NO: 194505 - DNA, 25 bp, Saccharomyces pastorianus
tatattgcacattcatcctgctcga

SEQ ID NO: 194506 - DNA, 25 bp, Saccharomyces pastorianus
gaataatgtgatccatgccttaaat

SEQ ID NO: 194507 - DNA, 25 bp, Saccharomyces pastorianus
gggcggctgattttatcatactatt

SEQ ID NO: 194508 - DNA, 25 bp, Saccharomyces pastorianus
agaacgctcgctcctggtgatgatc

SEQ ID NO: 194509 - DNA, 25 bp, Saccharomyces pastorianus
gtacctaacgactacttacagtgtt

SEQ ID NO: 194510 - DNA, 25 bp, Saccharomyces pastorianus
acatgctatgccaaatctgtcgata

SEQ ID NO: 194511 - DNA, 25 bp, Saccharomyces pastorianus
aaataatctaagttacctgatacaa

SEQ ID NO: 194512 - DNA, 25 bp, Saccharomyces pastorianus
atctaagttacctgatacaagaact

SEQ ID NO: 194513 - DNA, 25 bp, Saccharomyces pastorianus
aatctaagttacctgatacaagaac

SEQ ID NO: 194514 - DNA, 25 bp, Saccharomyces pastorianus
ttattaaataatctaagttacctga

SEQ ID NO: 194515 - DNA, 25 bp, Saccharomyces pastorianus
ataatctaagttacctgatacaaga

SEQ ID NO: 194516 - DNA, 25 bp, Saccharomyces pastorianus
taatctaagttacctgatacaagaa

SEQ ID NO: 194517 - DNA, 25 bp, Saccharomyces pastorianus
tattaaataatctaagttacctgat

SEQ ID NO: 194518 - DNA, 25 bp, Saccharomyces pastorianus
aataatctaagttacctgatacaag

SEQ ID NO: 194519 - DNA, 25 bp, Saccharomyces pastorianus
ttaaataatctaagttacctgatac

SEQ ID NO: 194520 - DNA, 25 bp, Saccharomyces pastorianus
attaaataatctaagttacctgata

SEQ ID NO: 194521 - DNA, 25 bp, Saccharomyces pastorianus
taaataatctaagttacctgataca

SEQ ID NO: 194522 - DNA, 25 bp, Saccharomyces pastorianus
ttcaatgtcgaatactttgctaagg

SEQ ID NO: 194523 - DNA, 25 bp, Saccharomyces pastorianus
gcccacgttacagtttcaaatcgct

SEQ ID NO: 194524 - DNA, 25 bp, Saccharomyces pastorianus
ggtttctgtcgaaggtgtcaacgtt

SEQ ID NO: 194525 - DNA, 25 bp, Saccharomyces pastorianus
acattagtcgtttgatatttctttt

SEQ ID NO: 194526 - DNA, 25 bp, Saccharomyces pastorianus
aaatcgctaggcataatctctccct

SEQ ID NO: 194527 - DNA, 25 bp, Saccharomyces pastorianus
ggttgtcgacaaggctttgattgct

SEQ ID NO: 194528 - DNA, 25 bp, Saccharomyces pastorianus
aggcataatctctccctataaaaat

SEQ ID NO: 194529 - DNA, 25 bp, Saccharomyces pastorianus
tacagtttcaaatcgctaggcataa

SEQ ID NO: 194530 - DNA, 25 bp, Saccharomyces pastorianus
ttttttccatttaggctccaaagtg

SEQ ID NO: 194531 - DNA, 25 bp, Saccharomyces pastorianus
attgctacctctactaaggtttctg

SEQ ID NO: 194532 - DNA, 25 bp, Saccharomyces pastorianus
aatttatcaccattcgcaaatcaag

SEQ ID NO: 194533 - DNA, 25 bp, Saccharomyces pastorianus
tgcaatatccgtttgaacctttttt

SEQ ID NO: 194534 - DNA, 25 bp, Saccharomyces pastorianus
aagagtatggcctttgcgttaagac

SEQ ID NO: 194535 - DNA, 25 bp, Saccharomyces pastorianus
cctggattatgtactgggtatgcag

SEQ ID NO: 194536 - DNA, 25 bp, Saccharomyces pastorianus
gcgggagatcacataagcaaagaat

SEQ ID NO: 194537 - DNA, 25 bp, Saccharomyces pastorianus
ttcatgttccgaccgttgtagcccc

SEQ ID NO: 194538 - DNA, 25 bp, Saccharomyces pastorianus
aatgtgctgatcatgtattatttgc

SEQ ID NO: 194539 - DNA, 25 bp, Saccharomyces pastorianus
gaaatgctgaaatcctttaatgtag

SEQ ID NO: 194540 - DNA, 25 bp, Saccharomyces pastorianus
atggcctttgcgttaagactatata

SEQ ID NO: 194541 - DNA, 25 bp, Saccharomyces pastorianus
gccatgtggaatgccttgatgcatt

SEQ ID NO: 194542 - DNA, 25 bp, Saccharomyces pastorianus
aagactatatatggcgggagatcac

SEQ ID NO: 194543 - DNA, 25 bp, Saccharomyces pastorianus
gtattatttgcaatatccgtttgaa

SEQ ID NO: 194544 - DNA, 25 bp, Saccharomyces pastorianus
actaacattgaatttcctcgtaact

SEQ ID NO: 194545 - DNA, 25 bp, Saccharomyces pastorianus
ttctctcaatgaaataattgttact

SEQ ID NO: 194546 - DNA, 25 bp, Saccharomyces pastorianus
gcattacttctttagacttttggta

SEQ ID NO: 194547 - DNA, 25 bp, Saccharomyces pastorianus
taattgcattacttctttagacttt

SEQ ID NO: 194548 - DNA, 25 bp, Saccharomyces pastorianus
gaatttcctcgtaactaattgcatt

SEQ ID NO: 194549 - DNA, 25 bp, Saccharomyces pastorianus
aaatattctcatttttctctcaatg

SEQ ID NO: 194550 - DNA, 25 bp, Saccharomyces pastorianus
aacattgaatttcctcgtaactaat

SEQ ID NO: 194551 - DNA, 25 bp, Saccharomyces pastorianus
tttcctcgtaactaattgcattact

SEQ ID NO: 194552 - DNA, 25 bp, Saccharomyces pastorianus
tgttactaacattgaatttcctcgt

SEQ ID NO: 194553 - DNA, 25 bp, Saccharomyces pastorianus
gtaactaattgcattacttctttag

SEQ ID NO: 194554 - DNA, 25 bp, Saccharomyces pastorianus
attgaatttcctcgtaactaattgc

SEQ ID NO: 194555 - DNA, 25 bp, Saccharomyces pastorianus
atctaagacttccatccgtgcttta

SEQ ID NO: 194556 - DNA, 25 bp, Saccharomyces pastorianus
taagacttccatccgtgctttatta

SEQ ID NO: 194557 - DNA, 25 bp, Saccharomyces pastorianus
gctttattacgtttgtatgatgcat

SEQ ID NO: 194558 - DNA, 25 bp, Saccharomyces pastorianus
atgatgccaaatcagcttgatgctg

SEQ ID NO: 194559 - DNA, 25 bp, Saccharomyces pastorianus
gccaaatcagcttgatgctgttggt

SEQ ID NO: 194560 - DNA, 25 bp, Saccharomyces pastorianus
acttccatccgtgctttattacgtt

SEQ ID NO: 194561 - DNA, 25 bp, Saccharomyces pastorianus
atatctaagacttccatccgtgctt

SEQ ID NO: 194562 - DNA, 25 bp, Saccharomyces pastorianus
ccatccgtgctttattacgtttgta

SEQ ID NO: 194563 - DNA, 25 bp, Saccharomyces pastorianus
tagcgaattttcttctacgaatata

SEQ ID NO: 194564 - DNA, 25 bp, Saccharomyces pastorianus
tgtatgatgcatacaatgatgccaa

SEQ ID NO: 194565 - DNA, 25 bp, Saccharomyces pastorianus
gtcatatctaagacttccatccgtg

SEQ ID NO: 194566 - DNA, 25 bp, Saccharomyces pastorianus
tcatttactttacagtttccggagt

SEQ ID NO: 194567 - DNA, 25 bp, Saccharomyces pastorianus
tgtttgaacttttgagtccttatag

SEQ ID NO: 194568 - DNA, 25 bp, Saccharomyces pastorianus
ccgtattattgcaaaaggaccacaa

SEQ ID NO: 194569 - DNA, 25 bp, Saccharomyces pastorianus
gagtccttatagaaatgctaatatt

SEQ ID NO: 194570 - DNA, 25 bp, Saccharomyces pastorianus
ttgcaaaaggaccacaaacaattga

SEQ ID NO: 194571 - DNA, 25 bp, Saccharomyces pastorianus
tgaacttttgagtccttatagaaat

SEQ ID NO: 194572 - DNA, 25 bp, Saccharomyces pastorianus
agcgattatatcatttactttacag

SEQ ID NO: 194573 - DNA, 25 bp, Saccharomyces pastorianus
tgctaatattatgatcaaagcgatt

SEQ ID NO: 194574 - DNA, 25 bp, Saccharomyces pastorianus
cttttgagtccttatagaaatgcta

SEQ ID NO: 194575 - DNA, 25 bp, Saccharomyces pastorianus
atatcatttactttacagtttccgg

SEQ ID NO: 194576 - DNA, 25 bp, Saccharomyces pastorianus
tttccggagtttccgtattattgca

SEQ ID NO: 194577 - DNA, 25 bp, Saccharomyces pastorianus
taatggccttgttatttaatggtaa

SEQ ID NO: 194578 - DNA, 25 bp, Saccharomyces pastorianus
aagtgccaagctattgagtggaata

SEQ ID NO: 194579 - DNA, 25 bp, Saccharomyces pastorianus
ggccaatctgccttcacgtacacaa

SEQ ID NO: 194580 - DNA, 25 bp, Saccharomyces pastorianus
agagccttctgaggccaatctgcct

SEQ ID NO: 194581 - DNA, 25 bp, Saccharomyces pastorianus
ggtaagagccttctgaggccaatct

SEQ ID NO: 194582 - DNA, 25 bp, Saccharomyces pastorianus
atgtgcaagtgccaagctattgagt

SEQ ID NO: 194583 - DNA, 25 bp, Saccharomyces pastorianus
ttgagtggaataatggccttgttat

SEQ ID NO: 194584 - DNA, 25 bp, Saccharomyces pastorianus
tcacgtacacaaccaccttgttagt

SEQ ID NO: 194585 - DNA, 25 bp, Saccharomyces pastorianus
tgaggccaatctgccttcacgtaca

SEQ ID NO: 194586 - DNA, 25 bp, Saccharomyces pastorianus
tttaatggtaagagccttctgaggc

SEQ ID NO: 194587 - DNA, 25 bp, Saccharomyces pastorianus
cacacaaatgtgcaagtgccaagct

SEQ ID NO: 194588 - DNA, 25 bp, Saccharomyces pastorianus
gacccatactggtaaagcacaagag

SEQ ID NO: 194589 - DNA, 25 bp, Saccharomyces pastorianus
aaaggctatttgatggacatctgaa

SEQ ID NO: 194590 - DNA, 25 bp, Saccharomyces pastorianus
cctggcgggaatgatggcgaagcat

SEQ ID NO: 194591 - DNA, 25 bp, Saccharomyces pastorianus
tggtttgaaaagacccatactggta

SEQ ID NO: 194592 - DNA, 25 bp, Saccharomyces pastorianus
gaatatctgatatcatatggttgga

SEQ ID NO: 194593 - DNA, 25 bp, Saccharomyces pastorianus
cctggatgtaagcactgattcgaat

SEQ ID NO: 194594 - DNA, 25 bp, Saccharomyces pastorianus
gagaaggtggtttgaaaagacccat

SEQ ID NO: 194595 - DNA, 25 bp, Saccharomyces pastorianus
tactggtaaagcacaagagagataa

SEQ ID NO: 194596 - DNA, 25 bp, Saccharomyces pastorianus
agcatggtgggaaaggctatttgat

SEQ ID NO: 194597 - DNA, 25 bp, Saccharomyces pastorianus
gaagaacctggatgtaagcactgat

SEQ ID NO: 194598 - DNA, 25 bp, Saccharomyces pastorianus
attgggtaatgctcctggcgggaat

SEQ ID NO: 194599 - DNA, 25 bp, Saccharomyces pastorianus
gaggcatgcatctttatagattctg

SEQ ID NO: 194600 - DNA, 25 bp, Saccharomyces pastorianus
gtgatacttccatttttggtgtagc

SEQ ID NO: 194601 - DNA, 25 bp, Saccharomyces pastorianus
aaacgaggcatgcatctttatagat

SEQ ID NO: 194602 - DNA, 25 bp, Saccharomyces pastorianus
ttttccgttcctgtgatacttccat

SEQ ID NO: 194603 - DNA, 25 bp, Saccharomyces pastorianus
gatgttcttgtttttaaacgaggca

SEQ ID NO: 194604 - DNA, 25 bp, Saccharomyces pastorianus
atttttggtgtagcagaatgtctga

SEQ ID NO: 194605 - DNA, 25 bp, Saccharomyces pastorianus
gttcctgtgatacttccatttttgg

SEQ ID NO: 194606 - DNA, 25 bp, Saccharomyces pastorianus
gtttttaaacgaggcatgcatcttt

SEQ ID NO: 194607 - DNA, 25 bp, Saccharomyces pastorianus
catctttatagattctgtatgcgaa

SEQ ID NO: 194608 - DNA, 25 bp, Saccharomyces pastorianus
atagattctgtatgcgaaggtattg

SEQ ID NO: 194609 - DNA, 25 bp, Saccharomyces pastorianus
acttccatttttggtgtagcagaat

SEQ ID NO: 194610 - DNA, 25 bp, Saccharomyces pastorianus
ttccagctgaacaagtcaccagagt

SEQ ID NO: 194611 - DNA, 25 bp, Saccharomyces pastorianus
tattccagctgaacaagtcaccaga

SEQ ID NO: 194612 - DNA, 25 bp, Saccharomyces pastorianus
gttgactggtattccagctgaacaa

SEQ ID NO: 194613 - DNA, 25 bp, Saccharomyces pastorianus
gtattccagctgaacaagtcaccag

SEQ ID NO: 194614 - DNA, 25 bp, Saccharomyces pastorianus
ctggtattccagctgaacaagtcac

SEQ ID NO: 194615 - DNA, 25 bp, Saccharomyces pastorianus
ttgactggtattccagctgaacaag

SEQ ID NO: 194616 - DNA, 25 bp, Saccharomyces pastorianus
tggtattccagctgaacaagtcacc

SEQ ID NO: 194617 - DNA, 25 bp, Saccharomyces pastorianus
tgactggtattccagctgaacaagt

SEQ ID NO: 194618 - DNA, 25 bp, Saccharomyces pastorianus
actggtattccagctgaacaagtca

SEQ ID NO: 194619 - DNA, 25 bp, Saccharomyces pastorianus
ggtattccagctgaacaagtcacca

SEQ ID NO: 194620 - DNA, 25 bp, Saccharomyces pastorianus
attccagctgaacaagtcaccagag

SEQ ID NO: 194621 - DNA, 25 bp, Saccharomyces pastorianus
taaactcaactcttctgaggagtca

SEQ ID NO: 194622 - DNA, 25 bp, Saccharomyces pastorianus
aacagcgtatgatcgataaactcaa

SEQ ID NO: 194623 - DNA, 25 bp, Saccharomyces pastorianus
atcaagcctaccaggcactagcttc

SEQ ID NO: 194624 - DNA, 25 bp, Saccharomyces pastorianus
gaaaatgtccaaggtcaagctgcat

SEQ ID NO: 194625 - DNA, 25 bp, Saccharomyces pastorianus
gcttcaccccaacgtctacaaaggt

SEQ ID NO: 194626 - DNA, 25 bp, Saccharomyces pastorianus
atgaatcttattctggagacgtaga

SEQ ID NO: 194627 - DNA, 25 bp, Saccharomyces pastorianus
gacgatcttaacaaaccatcttatg

SEQ ID NO: 194628 - DNA, 25 bp, Saccharomyces pastorianus
ttcttattccacacgcggtaacata

SEQ ID NO: 194629 - DNA, 25 bp, Saccharomyces pastorianus
tcaccttttaagtcgacattcgtta

SEQ ID NO: 194630 - DNA, 25 bp, Saccharomyces pastorianus
ggaatctcttacttcatcaagccta

SEQ ID NO: 194631 - DNA, 25 bp, Saccharomyces pastorianus
gatttggacgtatctaagcagaatt

SEQ ID NO: 194632 - DNA, 25 bp, Saccharomyces pastorianus
gaaaacggtattgttatcccacacg

SEQ ID NO: 194633 - DNA, 25 bp, Saccharomyces pastorianus
ttgttatcccacacgcccatggaga

SEQ ID NO: 194634 - DNA, 25 bp, Saccharomyces pastorianus
ttgtgcctcctaccatttaaagatg

SEQ ID NO: 194635 - DNA, 25 bp, Saccharomyces pastorianus
acacgcccatggagacgaggtcgtc

SEQ ID NO: 194636 - DNA, 25 bp, Saccharomyces pastorianus
tagcaacatgttatactcctgtggt

SEQ ID NO: 194637 - DNA, 25 bp, Saccharomyces pastorianus
gactcattgcaaccggtaaaaccca

SEQ ID NO: 194638 - DNA, 25 bp, Saccharomyces pastorianus
gacgaggtcgtcagagatattttta

SEQ ID NO: 194639 - DNA, 25 bp, Saccharomyces pastorianus
gatatttaccctggactcattgcaa

SEQ ID NO: 194640 - DNA, 25 bp, Saccharomyces pastorianus
tttataccagcacaacatagcaaca

SEQ ID NO: 194641 - DNA, 25 bp, Saccharomyces pastorianus
gagatatttttataccagcacaaca

SEQ ID NO: 194642 - DNA, 25 bp, Saccharomyces pastorianus
ttgtggagagttgtgcctcctacca

SEQ ID NO: 194643 - DNA, 25 bp, Saccharomyces pastorianus
aaccaaccatattacaagtcacaaa

SEQ ID NO: 194644 - DNA, 25 bp, Saccharomyces pastorianus
gtaaccaaccatattacaagtcaca

SEQ ID NO: 194645 - DNA, 25 bp, Saccharomyces pastorianus
tggtaaccaaccatattacaagtca

SEQ ID NO: 194646 - DNA, 25 bp, Saccharomyces pastorianus
atggtaaccaaccatattacaagtc

SEQ ID NO: 194647 - DNA, 25 bp, Saccharomyces pastorianus
tatggtaaccaaccatattacaagt

SEQ ID NO: 194648 - DNA, 25 bp, Saccharomyces pastorianus
accaaccatattacaagtcacaaat

SEQ ID NO: 194649 - DNA, 25 bp, Saccharomyces pastorianus
ggtaaccaaccatattacaagtcac

SEQ ID NO: 194650 - DNA, 25 bp, Saccharomyces pastorianus
taaccaaccatattacaagtcacaa

SEQ ID NO: 194651 - DNA, 25 bp, Saccharomyces pastorianus
ggctgtggcaggtgcaaccaatgtt

SEQ ID NO: 194652 - DNA, 25 bp, Saccharomyces pastorianus
actgctagtaagttaatcacttctg

SEQ ID NO: 194653 - DNA, 25 bp, Saccharomyces pastorianus
catccactcgaaggcccaagataaa

SEQ ID NO: 194654 - DNA, 25 bp, Saccharomyces pastorianus
gaagtggccgcatccacaatacaat

SEQ ID NO: 194655 - DNA, 25 bp, Saccharomyces pastorianus
caatgttttaatcactactgctagt

SEQ ID NO: 194656 - DNA, 25 bp, Saccharomyces pastorianus
cactgttccaaagatgttaccgatg

SEQ ID NO: 194657 - DNA, 25 bp, Saccharomyces pastorianus
gtaaccacgtcatgggtatgattga

SEQ ID NO: 194658 - DNA, 25 bp, Saccharomyces pastorianus
tgaaaacacatcacctgaacaattt

SEQ ID NO: 194659 - DNA, 25 bp, Saccharomyces pastorianus
gcagaagtttgggtaaccacgtcat

SEQ ID NO: 194660 - DNA, 25 bp, Saccharomyces pastorianus
gatgttaccgatgcatgcagaagtt

SEQ ID NO: 194661 - DNA, 25 bp, Saccharomyces pastorianus
gtgaaaacttccatccactcgaagg

SEQ ID NO: 194662 - DNA, 25 bp, Saccharomyces pastorianus
atcaccgaagtattgccaagagcag

SEQ ID NO: 194663 - DNA, 25 bp, Saccharomyces pastorianus
aagagcagtgggttcgctaacattc

SEQ ID NO: 194664 - DNA, 25 bp, Saccharomyces pastorianus
aatcaccgaagtattgccaagagca

SEQ ID NO: 194665 - DNA, 25 bp, Saccharomyces pastorianus
tccaatcaccgaagtattgccaaga

SEQ ID NO: 194666 - DNA, 25 bp, Saccharomyces pastorianus
caccgaagtattgccaagagcagtg

SEQ ID NO: 194667 - DNA, 25 bp, Saccharomyces pastorianus
caagagcagtgggttcgctaacatt

SEQ ID NO: 194668 - DNA, 25 bp, Saccharomyces pastorianus
attgccaagagcagtgggttcgcta

SEQ ID NO: 194669 - DNA, 25 bp, Saccharomyces pastorianus
gtattgccaagagcagtgggttcgc

SEQ ID NO: 194670 - DNA, 25 bp, Saccharomyces pastorianus
tgccaagagcagtgggttcgctaac

SEQ ID NO: 194671 - DNA, 25 bp, Saccharomyces pastorianus
aagtattgccaagagcagtgggttc

SEQ ID NO: 194672 - DNA, 25 bp, Saccharomyces pastorianus
gccaagagcagtgggttcgctaaca

SEQ ID NO: 194673 - DNA, 25 bp, Saccharomyces pastorianus
attctccaatccagctattcaggac

SEQ ID NO: 194674 - DNA, 25 bp, Saccharomyces pastorianus
atgcctaagtatgttttgccatcaa

SEQ ID NO: 194675 - DNA, 25 bp, Saccharomyces pastorianus
gttccgttacctgactggtgtagac

SEQ ID NO: 194676 - DNA, 25 bp, Saccharomyces pastorianus
ggaagttatcccattattgcctaaa

SEQ ID NO: 194677 - DNA, 25 bp, Saccharomyces pastorianus
agtatatccgtgttttgatgcgtga

SEQ ID NO: 194678 - DNA, 25 bp, Saccharomyces pastorianus
atgtgttgctggctggttccgttac

SEQ ID NO: 194679 - DNA, 25 bp, Saccharomyces pastorianus
gaagttgcgtctacttaacggtgga

SEQ ID NO: 194680 - DNA, 25 bp, Saccharomyces pastorianus
aggacactgtcgcacgtatttgttt

SEQ ID NO: 194681 - DNA, 25 bp, Saccharomyces pastorianus
aacggtggacattctgctatgggat

SEQ ID NO: 194682 - DNA, 25 bp, Saccharomyces pastorianus
ggatacttggcaggctacacctata

SEQ ID NO: 194683 - DNA, 25 bp, Saccharomyces pastorianus
aagtgccaggtgttgatttcgaaga

SEQ ID NO: 194684 - DNA, 25 bp, Saccharomyces pastorianus
accccttttgcgcgcctgcgaagtt

SEQ ID NO: 194685 - DNA, 25 bp, Saccharomyces pastorianus
gaaaaccccttttgcgcgcctgcga

SEQ ID NO: 194686 - DNA, 25 bp, Saccharomyces pastorianus
aaaccccttttgcgcgcctgcgaag

SEQ ID NO: 194687 - DNA, 25 bp, Saccharomyces pastorianus
tgaaaaccccttttgcgcgcctgcg

SEQ ID NO: 194688 - DNA, 25 bp, Saccharomyces pastorianus
cttttgcgcgcctgcgaagtttccg

SEQ ID NO: 194689 - DNA, 25 bp, Saccharomyces pastorianus
aaccccttttgcgcgcctgcgaagt

SEQ ID NO: 194690 - DNA, 25 bp, Saccharomyces pastorianus
ccccttttgcgcgcctgcgaagttt

SEQ ID NO: 194691 - DNA, 25 bp, Saccharomyces pastorianus
taggggtgccgaggtgccttgaaaa

SEQ ID NO: 194692 - DNA, 25 bp, Saccharomyces pastorianus
tgccaattataggggtgccgaggtg

SEQ ID NO: 194693 - DNA, 25 bp, Saccharomyces pastorianus
ttgaaaaccccttttgcgcgcctgc

SEQ ID NO: 194694 - DNA, 25 bp, Saccharomyces pastorianus
atgccaattataggggtgccgaggt

SEQ ID NO: 194695 - DNA, 25 bp, Saccharomyces pastorianus
acttatttcaatatacccacaaaat

SEQ ID NO: 194696 - DNA, 25 bp, Saccharomyces pastorianus
ttatttcaatatacccacaaaatca

SEQ ID NO: 194697 - DNA, 25 bp, Saccharomyces pastorianus
aatatacccacaaaatcaccaccaa

SEQ ID NO: 194698 - DNA, 25 bp, Saccharomyces pastorianus
tcaatatacccacaaaatcaccacc

SEQ ID NO: 194699 - DNA, 25 bp, Saccharomyces pastorianus
tatttcaatatacccacaaaatcac

SEQ ID NO: 194700 - DNA, 25 bp, Saccharomyces pastorianus
cacttatttcaatatacccacaaaa

SEQ ID NO: 194701 - DNA, 25 bp, Saccharomyces pastorianus
atatacccacaaaatcaccaccaaa

SEQ ID NO: 194702 - DNA, 25 bp, Saccharomyces pastorianus
tttcaatatacccacaaaatcacca

SEQ ID NO: 194703 - DNA, 25 bp, Saccharomyces pastorianus
atacccacaaaatcaccaccaaaat

SEQ ID NO: 194704 - DNA, 25 bp, Saccharomyces pastorianus
cttatttcaatatacccacaaaatc

SEQ ID NO: 194705 - DNA, 25 bp, Saccharomyces pastorianus
ttcaatatacccacaaaatcaccac

SEQ ID NO: 194706 - DNA, 25 bp, Saccharomyces pastorianus
ggtccttcctgaggaaagcggctac

SEQ ID NO: 194707 - DNA, 25 bp, Saccharomyces pastorianus
ccttcctgaggaaagcggctacaac

SEQ ID NO: 194708 - DNA, 25 bp, Saccharomyces pastorianus
cttcctgaggaaagcggctacaaca

SEQ ID NO: 194709 - DNA, 25 bp, Saccharomyces pastorianus
atacatggggtccttcctgaggaaa

SEQ ID NO: 194710 - DNA, 25 bp, Saccharomyces pastorianus
gtccttcctgaggaaagcggctaca

SEQ ID NO: 194711 - DNA, 25 bp, Saccharomyces pastorianus
gggtccttcctgaggaaagcggcta

SEQ ID NO: 194712 - DNA, 25 bp, Saccharomyces pastorianus
ctgaggaaagcggctacaacaaatt

SEQ ID NO: 194713 - DNA, 25 bp, Saccharomyces pastorianus
ttcctgaggaaagcggctacaacaa

SEQ ID NO: 194714 - DNA, 25 bp, Saccharomyces pastorianus
tccttcctgaggaaagcggctacaa

SEQ ID NO: 194715 - DNA, 25 bp, Saccharomyces pastorianus
aatacatggggtccttcctgaggaa

SEQ ID NO: 194716 - DNA, 25 bp, Saccharomyces pastorianus
cctgaggaaagcggctacaacaaat

SEQ ID NO: 194717 - DNA, 25 bp, Saccharomyces pastorianus
tacacctttggtttcatggcgaaat

SEQ ID NO: 194718 - DNA, 25 bp, Saccharomyces pastorianus
gaaatcgacctcttcagacgtgaaa

SEQ ID NO: 194719 - DNA, 25 bp, Saccharomyces pastorianus
aatacggagtaccattgcttgataa

SEQ ID NO: 194720 - DNA, 25 bp, Saccharomyces pastorianus
tagagatattatccggtcatgacat

SEQ ID NO: 194721 - DNA, 25 bp, Saccharomyces pastorianus
gggactcacatgcattacacctttg

SEQ ID NO: 194722 - DNA, 25 bp, Saccharomyces pastorianus
acgcatcggccaataagtatacggg

SEQ ID NO: 194723 - DNA, 25 bp, Saccharomyces pastorianus
cgacgatttactgaaccgcattggt

SEQ ID NO: 194724 - DNA, 25 bp, Saccharomyces pastorianus
ttaccattgtttccatcatccaaga

SEQ ID NO: 194725 - DNA, 25 bp, Saccharomyces pastorianus
agggatagttcgcacacttggtata

SEQ ID NO: 194726 - DNA, 25 bp, Saccharomyces pastorianus
agatggcaattcacccacgttaaat

SEQ ID NO: 194727 - DNA, 25 bp, Saccharomyces pastorianus
ggaaacagccgatttatttgagatt

SEQ ID NO: 194728 - DNA, 25 bp, Saccharomyces pastorianus
tgatttctggtacggctttttacca

SEQ ID NO: 194729 - DNA, 25 bp, Saccharomyces pastorianus
gcggcatctataatttacgttacca

SEQ ID NO: 194730 - DNA, 25 bp, Saccharomyces pastorianus
accaggttccctgaatcattgttca

SEQ ID NO: 194731 - DNA, 25 bp, Saccharomyces pastorianus
gagtaccttttccatctcttgattt

SEQ ID NO: 194732 - DNA, 25 bp, Saccharomyces pastorianus
accattttttcattttgattcaatc

SEQ ID NO: 194733 - DNA, 25 bp, Saccharomyces pastorianus
gaaggttggaatcattccgagtacc

SEQ ID NO: 194734 - DNA, 25 bp, Saccharomyces pastorianus
catctcttgatttctggtacggctt

SEQ ID NO: 194735 - DNA, 25 bp, Saccharomyces pastorianus
ggtagcggcatctataatttacgtt

SEQ ID NO: 194736 - DNA, 25 bp, Saccharomyces pastorianus
ttacgttaccaggttccctgaatca

SEQ ID NO: 194737 - DNA, 25 bp, Saccharomyces pastorianus
gaatcattccgagtaccttttccat

SEQ ID NO: 194738 - DNA, 25 bp, Saccharomyces pastorianus
ggttccctgaatcattgttcagacg

SEQ ID NO: 194739 - DNA, 25 bp, Saccharomyces pastorianus
aaataatctaagttacctgatacaa

SEQ ID NO: 194740 - DNA, 25 bp, Saccharomyces pastorianus
atctaagttacctgatacaagaact

SEQ ID NO: 194741 - DNA, 25 bp, Saccharomyces pastorianus
ttattaaataatctaagttacctga

SEQ ID NO: 194742 - DNA, 25 bp, Saccharomyces pastorianus
taatctaagttacctgatacaagaa

SEQ ID NO: 194743 - DNA, 25 bp, Saccharomyces pastorianus
ataatctaagttacctgatacaaga

SEQ ID NO: 194744 - DNA, 25 bp, Saccharomyces pastorianus
tattaaataatctaagttacctgat

SEQ ID NO: 194745 - DNA, 25 bp, Saccharomyces pastorianus
aataatctaagttacctgatacaag

SEQ ID NO: 194746 - DNA, 25 bp, Saccharomyces pastorianus
ttaaataatctaagttacctgatac

SEQ ID NO: 194747 - DNA, 25 bp, Saccharomyces pastorianus
attaaataatctaagttacctgata

SEQ ID NO: 194748 - DNA, 25 bp, Saccharomyces pastorianus
taaataatctaagttacctgataca

SEQ ID NO: 194749 - DNA, 25 bp, Saccharomyces pastorianus
aatctaagttacctgatacaagaac

SEQ ID NO: 194750 - DNA, 25 bp, Saccharomyces pastorianus
tggagttctttttggtttggcactt

SEQ ID NO: 194751 - DNA, 25 bp, Saccharomyces pastorianus
atttatgcgaaaagcgatgccccac

SEQ ID NO: 194752 - DNA, 25 bp, Saccharomyces pastorianus
ttcttgcagttcttcgcttttggaa

SEQ ID NO: 194753 - DNA, 25 bp, Saccharomyces pastorianus
atgttcgtgcaagcaggtctcatca

SEQ ID NO: 194754 - DNA, 25 bp, Saccharomyces pastorianus
gaacgttttggccacatacctgact

SEQ ID NO: 194755 - DNA, 25 bp, Saccharomyces pastorianus
ggtctcatcatatcctcaaacattt

SEQ ID NO: 194756 - DNA, 25 bp, Saccharomyces pastorianus
gtatccttgtgttctagaaactccc

SEQ ID NO: 194757 - DNA, 25 bp, Saccharomyces pastorianus
aacctgctagctattcctaactttg

SEQ ID NO: 194758 - DNA, 25 bp, Saccharomyces pastorianus
gatgccccactctatcgtaagggaa

SEQ ID NO: 194759 - DNA, 25 bp, Saccharomyces pastorianus
ttacaaccgttgtacactgttcctc

SEQ ID NO: 194760 - DNA, 25 bp, Saccharomyces pastorianus
aactttgttcttcatattctcctgc

SEQ ID NO: 194761 - DNA, 25 bp, Saccharomyces pastorianus
gtgcatacttcttgatggtaccctc

SEQ ID NO: 194762 - DNA, 25 bp, Saccharomyces pastorianus
gatttggttctctggatgtcgtact

SEQ ID NO: 194763 - DNA, 25 bp, Saccharomyces pastorianus
tctgggtgacactatctctaacaca

SEQ ID NO: 194764 - DNA, 25 bp, Saccharomyces pastorianus
gtagagcacttatgggcctatttga

SEQ ID NO: 194765 - DNA, 25 bp, Saccharomyces pastorianus
ctttagtcatcggtatcagtgcata

SEQ ID NO: 194766 - DNA, 25 bp, Saccharomyces pastorianus
tccctagtggctacgttgcaatgca

SEQ ID NO: 194767 - DNA, 25 bp, Saccharomyces pastorianus
tgatggtaccctccgtagttcaaac

SEQ ID NO: 194768 - DNA, 25 bp, Saccharomyces pastorianus
atgtcgtacttctacagctcttcag

SEQ ID NO: 194769 - DNA, 25 bp, Saccharomyces pastorianus
tcatcacttcaattgtggccttcgg

SEQ ID NO: 194770 - DNA, 25 bp, Saccharomyces pastorianus
taagactgtcgttcttctgggtgac

SEQ ID NO: 194771 - DNA, 25 bp, Saccharomyces pastorianus
atgatagcgtggtccctagtggcta

SEQ ID NO: 194772 - DNA, 25 bp, Saccharomyces pastorianus
acatcattccatacattattgcata

SEQ ID NO: 194773 - DNA, 25 bp, Saccharomyces pastorianus
tacattgctatcacatcattccata

SEQ ID NO: 194774 - DNA, 25 bp, Saccharomyces pastorianus
tatcgcggtcttacttacgttacca

SEQ ID NO: 194775 - DNA, 25 bp, Saccharomyces pastorianus
aagccgactacattggcaattataa

SEQ ID NO: 194776 - DNA, 25 bp, Saccharomyces pastorianus
aaattcctttaagccgactacattg

SEQ ID NO: 194777 - DNA, 25 bp, Saccharomyces pastorianus
attgcataaattcctttaagccgac

SEQ ID NO: 194778 - DNA, 25 bp, Saccharomyces pastorianus
tgtttgctaagctttatcgcggtct

SEQ ID NO: 194779 - DNA, 25 bp, Saccharomyces pastorianus
agctttatcgcggtcttacttacgt

SEQ ID NO: 194780 - DNA, 25 bp, Saccharomyces pastorianus
tctacacccctgttgccgttgtaat

SEQ ID NO: 194781 - DNA, 25 bp, Saccharomyces pastorianus
acattggcaattataattcttctac

SEQ ID NO: 194782 - DNA, 25 bp, Saccharomyces pastorianus
aattctatctacattgctatcacat

SEQ ID NO: 194783 - DNA, 25 bp, Saccharomyces pastorianus
atcactctcgaaaactgtgccctga

SEQ ID NO: 194784 - DNA, 25 bp, Saccharomyces pastorianus
aacgcttaccttgtaggcgccatgg

SEQ ID NO: 194785 - DNA, 25 bp, Saccharomyces pastorianus
gacccaaataaccatcaagctcgtg

SEQ ID NO: 194786 - DNA, 25 bp, Saccharomyces pastorianus
atgctgtattggcacgggcttataa

SEQ ID NO: 194787 - DNA, 25 bp, Saccharomyces pastorianus
atgttttttgactttcttgctgtga

SEQ ID NO: 194788 - DNA, 25 bp, Saccharomyces pastorianus
tgagctctgtgctgacgcattggaa

SEQ ID NO: 194789 - DNA, 25 bp, Saccharomyces pastorianus
aagttgtttgacgacttcgaccagt

SEQ ID NO: 194790 - DNA, 25 bp, Saccharomyces pastorianus
atgaacggttcgtgatcactctcga

SEQ ID NO: 194791 - DNA, 25 bp, Saccharomyces pastorianus
gtttcgttgggttgcaagcgttgtt

SEQ ID NO: 194792 - DNA, 25 bp, Saccharomyces pastorianus
atggagttgcgccaaggtgtaccaa

SEQ ID NO: 194793 - DNA, 25 bp, Saccharomyces pastorianus
gacctacattcagggctggcagaca

SEQ ID NO: 194794 - DNA, 25 bp, Saccharomyces pastorianus
ttaaggctctcagtatcgatctaac

SEQ ID NO: 194795 - DNA, 25 bp, Saccharomyces pastorianus
attaaggctctcagtatcgatctaa

SEQ ID NO: 194796 - DNA, 25 bp, Saccharomyces pastorianus
cattaaggctctcagtatcgatcta

SEQ ID NO: 194797 - DNA, 25 bp, Saccharomyces pastorianus
aaggctctcagtatcgatctaacgc

SEQ ID NO: 194798 - DNA, 25 bp, Saccharomyces pastorianus
gaacattaaggctctcagtatcgat

SEQ ID NO: 194799 - DNA, 25 bp, Saccharomyces pastorianus
aggaggaaaaattgaggatctcaaa

SEQ ID NO: 194800 - DNA, 25 bp, Saccharomyces pastorianus
taaggctctcagtatcgatctaacg

SEQ ID NO: 194801 - DNA, 25 bp, Saccharomyces pastorianus
aacattaaggctctcagtatcgatc

SEQ ID NO: 194802 - DNA, 25 bp, Saccharomyces pastorianus
aggctctcagtatcgatctaacgcc

SEQ ID NO: 194803 - DNA, 25 bp, Saccharomyces pastorianus
gatctcaaagagaacattaaggctc

SEQ ID NO: 194804 - DNA, 25 bp, Saccharomyces pastorianus
acattaaggctctcagtatcgatct

SEQ ID NO: 194805 - DNA, 25 bp, Saccharomyces pastorianus
aggcatattaacgtagcccgcacgc

SEQ ID NO: 194806 - DNA, 25 bp, Saccharomyces pastorianus
gaaaatcccggcgatattacagata

SEQ ID NO: 194807 - DNA, 25 bp, Saccharomyces pastorianus
gcacgccctggttaagacttgatat

SEQ ID NO: 194808 - DNA, 25 bp, Saccharomyces pastorianus
gaatattactgcatagtggcccaat

SEQ ID NO: 194809 - DNA, 25 bp, Saccharomyces pastorianus
gctttcatccctttgacgaaggtga

SEQ ID NO: 194810 - DNA, 25 bp, Saccharomyces pastorianus
agtacatccgcgcatattcttccta

SEQ ID NO: 194811 - DNA, 25 bp, Saccharomyces pastorianus
gcatattcttcctagcggaaggcat

SEQ ID NO: 194812 - DNA, 25 bp, Saccharomyces pastorianus
tatttagagatgctttcatcccttt

SEQ ID NO: 194813 - DNA, 25 bp, Saccharomyces pastorianus
tgttctgtatagtacatccgcgcat

SEQ ID NO: 194814 - DNA, 25 bp, Saccharomyces pastorianus
tacagataaacattacacccgcatg

SEQ ID NO: 194815 - DNA, 25 bp, Saccharomyces pastorianus
tagtggcccaattgcaggatttagc

SEQ ID NO: 194816 - DNA, 25 bp, Saccharomyces pastorianus
ataaattccatgattatctacattt

SEQ ID NO: 194817 - DNA, 25 bp, Saccharomyces pastorianus
cataaattccatgattatctacatt

SEQ ID NO: 194818 - DNA, 25 bp, Saccharomyces pastorianus
attccatgattatctacattttaat

SEQ ID NO: 194819 - DNA, 25 bp, Saccharomyces pastorianus
ttccatgattatctacattttaata

SEQ ID NO: 194820 - DNA, 25 bp, Saccharomyces pastorianus
aattccatgattatctacattttaa

SEQ ID NO: 194821 - DNA, 25 bp, Saccharomyces pastorianus
aaattccatgattatctacatttta

SEQ ID NO: 194822 - DNA, 25 bp, Saccharomyces pastorianus
tggcggcccaaaatattgtataact

SEQ ID NO: 194823 - DNA, 25 bp, Saccharomyces pastorianus
cccataaattccatgattatctaca

SEQ ID NO: 194824 - DNA, 25 bp, Saccharomyces pastorianus
catttggcggcccaaaatattgtat

SEQ ID NO: 194825 - DNA, 25 bp, Saccharomyces pastorianus
ccataaattccatgattatctacat

SEQ ID NO: 194826 - DNA, 25 bp, Saccharomyces pastorianus
taaattccatgattatctacatttt

SEQ ID NO: 194827 - DNA, 25 bp, Saccharomyces pastorianus
gcagctccgatagttgacattctca

SEQ ID NO: 194828 - DNA, 25 bp, Saccharomyces pastorianus
tctgtttcctattatatttgcgcac

SEQ ID NO: 194829 - DNA, 25 bp, Saccharomyces pastorianus
ggactctttttccgcggaaagatat

SEQ ID NO: 194830 - DNA, 25 bp, Saccharomyces pastorianus
gttgacattctcattagtaaccgaa

SEQ ID NO: 194831 - DNA, 25 bp, Saccharomyces pastorianus
agttgtggcagctccgatagttgac

SEQ ID NO: 194832 - DNA, 25 bp, Saccharomyces pastorianus
gaaagatatggtctccgtcggtcct

SEQ ID NO: 194833 - DNA, 25 bp, Saccharomyces pastorianus
gtcctctgtttcctattatatttgc

SEQ ID NO: 194834 - DNA, 25 bp, Saccharomyces pastorianus
gtcggtcctctgtttcctattatat

SEQ ID NO: 194835 - DNA, 25 bp, Saccharomyces pastorianus
cattctcattagtaaccgaacttct

SEQ ID NO: 194836 - DNA, 25 bp, Saccharomyces pastorianus
cgttgcctagtagttgtggcagctc

SEQ ID NO: 194837 - DNA, 25 bp, Saccharomyces pastorianus
cctagtagttgtggcagctccgata

SEQ ID NO: 194838 - DNA, 25 bp, Saccharomyces pastorianus
agcggtgtcgtccatgcatatatca

SEQ ID NO: 194839 - DNA, 25 bp, Saccharomyces pastorianus
gatcatgctatacgcagtaaggttc

SEQ ID NO: 194840 - DNA, 25 bp, Saccharomyces pastorianus
tatagatcgacgttgctggtggtaa

SEQ ID NO: 194841 - DNA, 25 bp, Saccharomyces pastorianus
atcggtccaagttctaagcggtgtc

SEQ ID NO: 194842 - DNA, 25 bp, Saccharomyces pastorianus
gggaacgatttactagatcatgcta

SEQ ID NO: 194843 - DNA, 25 bp, Saccharomyces pastorianus
acgcagtaaggttctgatagttaat

SEQ ID NO: 194844 - DNA, 25 bp, Saccharomyces pastorianus
gttactggcgtcaactcttcaaata

SEQ ID NO: 194845 - DNA, 25 bp, Saccharomyces pastorianus
ggtgtcgtccatgcatatatcattt

SEQ ID NO: 194846 - DNA, 25 bp, Saccharomyces pastorianus
gcggtgtcgtccatgcatatatcat

SEQ ID NO: 194847 - DNA, 25 bp, Saccharomyces pastorianus
taagcggtgtcgtccatgcatatat

SEQ ID NO: 194848 - DNA, 25 bp, Saccharomyces pastorianus
gatagttaattacaatcggtccaag

SEQ ID NO: 194849 - DNA, 25 bp, Saccharomyces pastorianus
ttatgtactcgataattctttgacc

SEQ ID NO: 194850 - DNA, 25 bp, Saccharomyces pastorianus
tcaacgtagacgaggccttttatag

SEQ ID NO: 194851 - DNA, 25 bp, Saccharomyces pastorianus
gagattcggagctaacctcatctgc

SEQ ID NO: 194852 - DNA, 25 bp, Saccharomyces pastorianus
gtcagccgttaaccataacggtgaa

SEQ ID NO: 194853 - DNA, 25 bp, Saccharomyces pastorianus
agacgaggccttttatagccttatt

SEQ ID NO: 194854 - DNA, 25 bp, Saccharomyces pastorianus
acgggtcttatgtactcgataattc

SEQ ID NO: 194855 - DNA, 25 bp, Saccharomyces pastorianus
gctccagttcaaagtcagccgttaa

SEQ ID NO: 194856 - DNA, 25 bp, Saccharomyces pastorianus
taacctcatctgcaacagcggatag

SEQ ID NO: 194857 - DNA, 25 bp, Saccharomyces pastorianus
caatagcatgaatcgtcaactggat

SEQ ID NO: 194858 - DNA, 25 bp, Saccharomyces pastorianus
tgcgaaacaagccatcaacgtagac

SEQ ID NO: 194859 - DNA, 25 bp, Saccharomyces pastorianus
gtcgtggtaatcaaaataatgcctt

SEQ ID NO: 194860 - DNA, 25 bp, Saccharomyces pastorianus
aaccaaccatattacaagtcacaaa

SEQ ID NO: 194861 - DNA, 25 bp, Saccharomyces pastorianus
gtaaccaaccatattacaagtcaca

SEQ ID NO: 194862 - DNA, 25 bp, Saccharomyces pastorianus
tggtaaccaaccatattacaagtca

SEQ ID NO: 194863 - DNA, 25 bp, Saccharomyces pastorianus
atggtaaccaaccatattacaagtc

SEQ ID NO: 194864 - DNA, 25 bp, Saccharomyces pastorianus
tatggtaaccaaccatattacaagt

SEQ ID NO: 194865 - DNA, 25 bp, Saccharomyces pastorianus
accaaccatattacaagtcacaaat

SEQ ID NO: 194866 - DNA, 25 bp, Saccharomyces pastorianus
ggtaaccaaccatattacaagtcac

SEQ ID NO: 194867 - DNA, 25 bp, Saccharomyces pastorianus
taaccaaccatattacaagtcacaa

SEQ ID NO: 194868 - DNA, 25 bp, Saccharomyces pastorianus
cgattggtcatattaatcatgacca

SEQ ID NO: 194869 - DNA, 25 bp, Saccharomyces pastorianus
acacgccgattggtcatattaatca

SEQ ID NO: 194870 - DNA, 25 bp, Saccharomyces pastorianus
acgccgattggtcatattaatcatg

SEQ ID NO: 194871 - DNA, 25 bp, Saccharomyces pastorianus
gattggtcatattaatcatgaccaa

SEQ ID NO: 194872 - DNA, 25 bp, Saccharomyces pastorianus
gtcatattaatcatgaccaatataa

SEQ ID NO: 194873 - DNA, 25 bp, Saccharomyces pastorianus
cgccgattggtcatattaatcatga

SEQ ID NO: 194874 - DNA, 25 bp, Saccharomyces pastorianus
gccgattggtcatattaatcatgac

SEQ ID NO: 194875 - DNA, 25 bp, Saccharomyces pastorianus
cacacgccgattggtcatattaatc

SEQ ID NO: 194876 - DNA, 25 bp, Saccharomyces pastorianus
cacgccgattggtcatattaatcat

SEQ ID NO: 194877 - DNA, 25 bp, Saccharomyces pastorianus
ccgattggtcatattaatcatgacc

SEQ ID NO: 194878 - DNA, 25 bp, Saccharomyces pastorianus
tcatattaatcatgaccaatataat

SEQ ID NO: 194879 - DNA, 25 bp, Saccharomyces pastorianus
atattatcgtatcgcctctctttca

SEQ ID NO: 194880 - DNA, 25 bp, Saccharomyces pastorianus
atcatattatcgtatcgcctctctt

SEQ ID NO: 194881 - DNA, 25 bp, Saccharomyces pastorianus
atcgcctctctttcaatgcaaaacg

SEQ ID NO: 194882 - DNA, 25 bp, Saccharomyces pastorianus
ctttgttttgtagtccttgattgcc

SEQ ID NO: 194883 - DNA, 25 bp, Saccharomyces pastorianus
tcctctttgttttgtagtccttgat

SEQ ID NO: 194884 - DNA, 25 bp, Saccharomyces pastorianus
cgcctctctttcaatgcaaaacgga

SEQ ID NO: 194885 - DNA, 25 bp, Saccharomyces pastorianus
gttcctctttgttttgtagtccttg

SEQ ID NO: 194886 - DNA, 25 bp, Saccharomyces pastorianus
tgttttgtagtccttgattgccgcc

SEQ ID NO: 194887 - DNA, 25 bp, Saccharomyces pastorianus
gtatcgcctctctttcaatgcaaaa

SEQ ID NO: 194888 - DNA, 25 bp, Saccharomyces pastorianus
ttatcgtatcgcctctctttcaatg

SEQ ID NO: 194889 - DNA, 25 bp, Saccharomyces pastorianus
ctctctttcaatgcaaaacggaggg

SEQ ID NO: 194890 - DNA, 25 bp, Saccharomyces pastorianus
cataccttttactattaaccctgat

SEQ ID NO: 194891 - DNA, 25 bp, Saccharomyces pastorianus
ggcgaaggcaaatcctgaaaatttt

SEQ ID NO: 194892 - DNA, 25 bp, Saccharomyces pastorianus
ttctgctgtcaattagatttagtac

SEQ ID NO: 194893 - DNA, 25 bp, Saccharomyces pastorianus
tttttcttttcacatacagcgcctt

SEQ ID NO: 194894 - DNA, 25 bp, Saccharomyces pastorianus
ataaaggctttgtattctgctgtca

SEQ ID NO: 194895 - DNA, 25 bp, Saccharomyces pastorianus
atgggtttatacaggccgtcaaaat

SEQ ID NO: 194896 - DNA, 25 bp, Saccharomyces pastorianus
ccccaccagacatatataaaggctt

SEQ ID NO: 194897 - DNA, 25 bp, Saccharomyces pastorianus
ttttcacatacagcgccttaaggcg

SEQ ID NO: 194898 - DNA, 25 bp, Saccharomyces pastorianus
gtatgtaatataccccaaacatttt

SEQ ID NO: 194899 - DNA, 25 bp, Saccharomyces pastorianus
cataccccacataccttttactatt

SEQ ID NO: 194900 - DNA, 25 bp, Saccharomyces pastorianus
gatttagtacatcttttctcttatg

SEQ ID NO: 194901 - DNA, 25 bp, Saccharomyces pastorianus
aaccaaccatattacaagtcacaaa

SEQ ID NO: 194902 - DNA, 25 bp, Saccharomyces pastorianus
gtaaccaaccatattacaagtcaca

SEQ ID NO: 194903 - DNA, 25 bp, Saccharomyces pastorianus
tggtaaccaaccatattacaagtca

SEQ ID NO: 194904 - DNA, 25 bp, Saccharomyces pastorianus
atggtaaccaaccatattacaagtc

SEQ ID NO: 194905 - DNA, 25 bp, Saccharomyces pastorianus
tatggtaaccaaccatattacaagt

SEQ ID NO: 194906 - DNA, 25 bp, Saccharomyces pastorianus
accaaccatattacaagtcacaaat

SEQ ID NO: 194907 - DNA, 25 bp, Saccharomyces pastorianus
ggtaaccaaccatattacaagtcac

SEQ ID NO: 194908 - DNA, 25 bp, Saccharomyces pastorianus
taaccaaccatattacaagtcacaa

SEQ ID NO: 194909 - DNA, 25 bp, Saccharomyces pastorianus
gaaacctggaaagtagagctgttaa

SEQ ID NO: 194910 - DNA, 25 bp, Saccharomyces pastorianus
gtcaacagagccgaagtccttagat

SEQ ID NO: 194911 - DNA, 25 bp, Saccharomyces pastorianus
atttctcgggaaaaaagcagcttcg

SEQ ID NO: 194912 - DNA, 25 bp, Saccharomyces pastorianus
gtatatgcatcaaatggtactggga

SEQ ID NO: 194913 - DNA, 25 bp, Saccharomyces pastorianus
cgatgcagaaaactgtgagtcttta

SEQ ID NO: 194914 - DNA, 25 bp, Saccharomyces pastorianus
gcgtgtatttgtcggaagattgcta

SEQ ID NO: 194915 - DNA, 25 bp, Saccharomyces pastorianus
gtactgggaatagagtcgatgcgtt

SEQ ID NO: 194916 - DNA, 25 bp, Saccharomyces pastorianus
tttcgctcataattgtttgtgcttc

SEQ ID NO: 194917 - DNA, 25 bp, Saccharomyces pastorianus
gtcgatgcgttgttcagtagtgtaa

SEQ ID NO: 194918 - DNA, 25 bp, Saccharomyces pastorianus
gtgagtctttagcacaagtcaacag

SEQ ID NO: 194919 - DNA, 25 bp, Saccharomyces pastorianus
gccgaagtccttagatattctttag

SEQ ID NO: 194920 - DNA, 25 bp, Saccharomyces pastorianus
aagcgcttatctttaaggaccaaca

SEQ ID NO: 194921 - DNA, 25 bp, Saccharomyces pastorianus
gcttatctttaaggaccaacatatt

SEQ ID NO: 194922 - DNA, 25 bp, Saccharomyces pastorianus
aagacaacaggcaaaataatttcgt

SEQ ID NO: 194923 - DNA, 25 bp, Saccharomyces pastorianus
ggaccaacatattagatgaattctt

SEQ ID NO: 194924 - DNA, 25 bp, Saccharomyces pastorianus
gtagcattaccatcacaagacaaaa

SEQ ID NO: 194925 - DNA, 25 bp, Saccharomyces pastorianus
gcaaaagcgcttatctttaaggacc

SEQ ID NO: 194926 - DNA, 25 bp, Saccharomyces pastorianus
agatgaattcttaagggttgccaaa

SEQ ID NO: 194927 - DNA, 25 bp, Saccharomyces pastorianus
ttcttaagggttgccaaaacgcaag

SEQ ID NO: 194928 - DNA, 25 bp, Saccharomyces pastorianus
tcagaattttacaagcaaaagcgct

SEQ ID NO: 194929 - DNA, 25 bp, Saccharomyces pastorianus
atgttcaatgtagcattaccatcac

SEQ ID NO: 194930 - DNA, 25 bp, Saccharomyces pastorianus
gggttgccaaaacgcaagacaacag

SEQ ID NO: 194931 - DNA, 25 bp, Saccharomyces pastorianus
tgacaaacggttcaggttcatcaac

SEQ ID NO: 194932 - DNA, 25 bp, Saccharomyces pastorianus
tacagttatgactgccgtctcggca

SEQ ID NO: 194933 - DNA, 25 bp, Saccharomyces pastorianus
tcctgctgcattccaaggagcaagt

SEQ ID NO: 194934 - DNA, 25 bp, Saccharomyces pastorianus
ctaaggtcgttaccgacaccgctga

SEQ ID NO: 194935 - DNA, 25 bp, Saccharomyces pastorianus
actcaagccgtcgaatcatctacat

SEQ ID NO: 194936 - DNA, 25 bp, Saccharomyces pastorianus
gaaggaccagataccacctctgaaa

SEQ ID NO: 194937 - DNA, 25 bp, Saccharomyces pastorianus
aaggttgtcaccgaaggaccagata

SEQ ID NO: 194938 - DNA, 25 bp, Saccharomyces pastorianus
gaccactaagactattactgctact

SEQ ID NO: 194939 - DNA, 25 bp, Saccharomyces pastorianus
ttcatcaaccaacctttacaccaag

SEQ ID NO: 194940 - DNA, 25 bp, Saccharomyces pastorianus
ctattttcggagctactacagttat

SEQ ID NO: 194941 - DNA, 25 bp, Saccharomyces pastorianus
cggcagcagctgtgtcgagtgtaat

SEQ ID NO: 194942 - DNA, 25 bp, Saccharomyces pastorianus
aattatctagttacaccggtgctgc

SEQ ID NO: 194943 - DNA, 25 bp, Saccharomyces pastorianus
aggttctggttctagtatcactacc

SEQ ID NO: 194944 - DNA, 25 bp, Saccharomyces pastorianus
acacctggtctccaagtagtacttc

SEQ ID NO: 194945 - DNA, 25 bp, Saccharomyces pastorianus
atgaaattctcttccgctttggttc

SEQ ID NO: 194946 - DNA, 25 bp, Saccharomyces pastorianus
tgaaggcagcagcaacacctggtct

SEQ ID NO: 194947 - DNA, 25 bp, Saccharomyces pastorianus
aagtagtacttctaccagctcagaa

SEQ ID NO: 194948 - DNA, 25 bp, Saccharomyces pastorianus
acatcctctagcaccgctgaattat

SEQ ID NO: 194949 - DNA, 25 bp, Saccharomyces pastorianus
actgctgaaacttcttcctctgcta

SEQ ID NO: 194950 - DNA, 25 bp, Saccharomyces pastorianus
ggtcacgtctacactaagactgtca

SEQ ID NO: 194951 - DNA, 25 bp, Saccharomyces pastorianus
ttgctgagagtatcaccaccaccat

SEQ ID NO: 194952 - DNA, 25 bp, Saccharomyces pastorianus
ggtgaagactcttacgccagcagca

SEQ ID NO: 194953 - DNA, 25 bp, Saccharomyces pastorianus
cctggacctctgtcgatggcaataa

SEQ ID NO: 194954 - DNA, 25 bp, Saccharomyces pastorianus
gaaagcctcctgtttattgccggag

SEQ ID NO: 194955 - DNA, 25 bp, Saccharomyces pastorianus
atttgttcgaaagcctcctgtttat

SEQ ID NO: 194956 - DNA, 25 bp, Saccharomyces pastorianus
aggcaggtcgccaggtcaaaagcaa

SEQ ID NO: 194957 - DNA, 25 bp, Saccharomyces pastorianus
cacttgttgcgggtcagagggcttt

SEQ ID NO: 194958 - DNA, 25 bp, Saccharomyces pastorianus
atggacaaagcacgcgaacacattt

SEQ ID NO: 194959 - DNA, 25 bp, Saccharomyces pastorianus
aatctttgttggtcacttgttgcgg

SEQ ID NO: 194960 - DNA, 25 bp, Saccharomyces pastorianus
gcgagtactagcagaaggaccttat

SEQ ID NO: 194961 - DNA, 25 bp, Saccharomyces pastorianus
ggcagactgctgacgacatcgaaat

SEQ ID NO: 194962 - DNA, 25 bp, Saccharomyces pastorianus
ggtcaaaagcaacgattctcatcaa

SEQ ID NO: 194963 - DNA, 25 bp, Saccharomyces pastorianus
gtgtacgtaaccttgatctcttaga

SEQ ID NO: 194964 - DNA, 25 bp, Saccharomyces pastorianus
aagccagactctcttggtatcacga

SEQ ID NO: 194965 - DNA, 25 bp, Saccharomyces pastorianus
atccacgtcaaaatgctccaatctt

SEQ ID NO: 194966 - DNA, 25 bp, Saccharomyces pastorianus
agtaaggctccagatttcgtaattg

SEQ ID NO: 194967 - DNA, 25 bp, Saccharomyces pastorianus
gaactttttccgatatactccctag

SEQ ID NO: 194968 - DNA, 25 bp, Saccharomyces pastorianus
gcctgtcagggagctttaatccatt

SEQ ID NO: 194969 - DNA, 25 bp, Saccharomyces pastorianus
ggacggtatgcgttttcgttggcat

SEQ ID NO: 194970 - DNA, 25 bp, Saccharomyces pastorianus
aaaattactcggagctcgccggatt

SEQ ID NO: 194971 - DNA, 25 bp, Saccharomyces pastorianus
agctcgccggatttctatatctaca

SEQ ID NO: 194972 - DNA, 25 bp, Saccharomyces pastorianus
ttctatccttctaaaacgcagccgg

SEQ ID NO: 194973 - DNA, 25 bp, Saccharomyces pastorianus
gatccgcctttatactctgattgta

SEQ ID NO: 194974 - DNA, 25 bp, Saccharomyces pastorianus
gtatcacgaccgttcctgatttgac

SEQ ID NO: 194975 - DNA, 25 bp, Saccharomyces pastorianus
ggtaatacaggcattcccatagtcg

SEQ ID NO: 194976 - DNA, 25 bp, Saccharomyces pastorianus
atttcttccgaaaataagcgtccag

SEQ ID NO: 194977 - DNA, 25 bp, Saccharomyces pastorianus
gggagaataaccctgtagcatttga

SEQ ID NO: 194978 - DNA, 25 bp, Saccharomyces pastorianus
gggaatgccttatcgattggacact

SEQ ID NO: 194979 - DNA, 25 bp, Saccharomyces pastorianus
gtacaggaattgatgcccaaccata

SEQ ID NO: 194980 - DNA, 25 bp, Saccharomyces pastorianus
atattcgtcaaacaatgggttcccg

SEQ ID NO: 194981 - DNA, 25 bp, Saccharomyces pastorianus
tgtgcaactggccatatacctcaat

SEQ ID NO: 194982 - DNA, 25 bp, Saccharomyces pastorianus
acggtgattcgtcttcaaatgttgg

SEQ ID NO: 194983 - DNA, 25 bp, Saccharomyces pastorianus
attcccatagtcgatgccataatga

SEQ ID NO: 194984 - DNA, 25 bp, Saccharomyces pastorianus
attcgtccacccaaaatttcatcaa

SEQ ID NO: 194985 - DNA, 25 bp, Saccharomyces pastorianus
tgggttcccgaattgatttcttccg

SEQ ID NO: 194986 - DNA, 25 bp, Saccharomyces pastorianus
ttattgtaccgccatccagttgaag

SEQ ID NO: 194987 - DNA, 25 bp, Saccharomyces pastorianus
actctactcagtatggcgttcaagt

SEQ ID NO: 194988 - DNA, 25 bp, Saccharomyces pastorianus
gctggtgccgacgttttaactgaaa

SEQ ID NO: 194989 - DNA, 25 bp, Saccharomyces pastorianus
ttcgctgcgaatgagacattaccag

SEQ ID NO: 194990 - DNA, 25 bp, Saccharomyces pastorianus
accccaactgtgaacattttcgctg

SEQ ID NO: 194991 - DNA, 25 bp, Saccharomyces pastorianus
atctacgtttgctggtgccgacgtt

SEQ ID NO: 194992 - DNA, 25 bp, Saccharomyces pastorianus
aaccaattgtttaactctactcagt

SEQ ID NO: 194993 - DNA, 25 bp, Saccharomyces pastorianus
aactgtgaacattttcgctgcgaat

SEQ ID NO: 194994 - DNA, 25 bp, Saccharomyces pastorianus
ttgctagcaatgatacgaagaactt

SEQ ID NO: 194995 - DNA, 25 bp, Saccharomyces pastorianus
ataacctacatggacctcactgtgg

SEQ ID NO: 194996 - DNA, 25 bp, Saccharomyces pastorianus
gactaacgtcacttgtaataaccta

SEQ ID NO: 194997 - DNA, 25 bp, Saccharomyces pastorianus
attcggtagcgggaaagactttgct

SEQ ID NO: 194998 - DNA, 25 bp, Saccharomyces pastorianus
gagcctgcaagcaacaacagtgatg

SEQ ID NO: 194999 - DNA, 25 bp, Saccharomyces pastorianus
cggagaaattgttgatgccatttat

SEQ ID NO: 195000 - DNA, 25 bp, Saccharomyces pastorianus
gaatgatttattgatacccgaagtc

SEQ ID NO: 195001 - DNA, 25 bp, Saccharomyces pastorianus
aacagtgatgaattcggtagcggga

SEQ ID NO: 195002 - DNA, 25 bp, Saccharomyces pastorianus
taaggtttgagcctgcaagcaacaa

SEQ ID NO: 195003 - DNA, 25 bp, Saccharomyces pastorianus
gaagtctactcttttatgacagata

SEQ ID NO: 195004 - DNA, 25 bp, Saccharomyces pastorianus
gatacccgaagtctactcttttatg

SEQ ID NO: 195005 - DNA, 25 bp, Saccharomyces pastorianus
gggaaagactttgctgtctaccaat

SEQ ID NO: 195006 - DNA, 25 bp, Saccharomyces pastorianus
aagactttgctgtctaccaatatgt

SEQ ID NO: 195007 - DNA, 25 bp, Saccharomyces pastorianus
cttttgtttaaggtttgagcctgca

SEQ ID NO: 195008 - DNA, 25 bp, Saccharomyces pastorianus
aggtgcagtggttcaagaggctata

SEQ ID NO: 195009 - DNA, 25 bp, Saccharomyces pastorianus
gtatttttagcacctcgaatgccct

SEQ ID NO: 195010 - DNA, 25 bp, Saccharomyces pastorianus
acgagtcgacgataactattccgta

SEQ ID NO: 195011 - DNA, 25 bp, Saccharomyces pastorianus
gataactattccgtaatggcctttt

SEQ ID NO: 195012 - DNA, 25 bp, Saccharomyces pastorianus
acctcgaatgcccttttagatgcat

SEQ ID NO: 195013 - DNA, 25 bp, Saccharomyces pastorianus
gtccaattctgggagcaaccggcag

SEQ ID NO: 195014 - DNA, 25 bp, Saccharomyces pastorianus
gagtttattggtttacgagtcgacg

SEQ ID NO: 195015 - DNA, 25 bp, Saccharomyces pastorianus
gatgcattagttatggtccaattct

SEQ ID NO: 195016 - DNA, 25 bp, Saccharomyces pastorianus
cgtaatggccttttttggaggtgca

SEQ ID NO: 195017 - DNA, 25 bp, Saccharomyces pastorianus
ggctataaagcttatcacacaccat

SEQ ID NO: 195018 - DNA, 25 bp, Saccharomyces pastorianus
cacacaccattacgttcctattgat

SEQ ID NO: 195019 - DNA, 25 bp, Saccharomyces pastorianus
ttctttttgactttgttttgcggag

SEQ ID NO: 195020 - DNA, 25 bp, Saccharomyces pastorianus
gagtgtattgaccttttctatctat

SEQ ID NO: 195021 - DNA, 25 bp, Saccharomyces pastorianus
gttgaggcaaaagtttggctcgcca

SEQ ID NO: 195022 - DNA, 25 bp, Saccharomyces pastorianus
tcttctttccaattacctccgggag

SEQ ID NO: 195023 - DNA, 25 bp, Saccharomyces pastorianus
aaaatgccggtcctgtcaaagttga

SEQ ID NO: 195024 - DNA, 25 bp, Saccharomyces pastorianus
gttaagtgtaaccacattgctgagt

SEQ ID NO: 195025 - DNA, 25 bp, Saccharomyces pastorianus
agctgatctgttggcctatgtatat

SEQ ID NO: 195026 - DNA, 25 bp, Saccharomyces pastorianus
tttggatgcacctgtgggacctatt

SEQ ID NO: 195027 - DNA, 25 bp, Saccharomyces pastorianus
gccgaatttccacaactagctgatc

SEQ ID NO: 195028 - DNA, 25 bp, Saccharomyces pastorianus
ggaaatgatccatactccgacgata

SEQ ID NO: 195029 - DNA, 25 bp, Saccharomyces pastorianus
gacgatacagacagtgcctcttctt

SEQ ID NO: 195030 - DNA, 25 bp, Saccharomyces pastorianus
atttgactttggcatcgcaacctgc

SEQ ID NO: 195031 - DNA, 25 bp, Saccharomyces pastorianus
agtagtgataaaatattcggctggg

SEQ ID NO: 195032 - DNA, 25 bp, Saccharomyces pastorianus
actatcgcggatatttgactttggc

SEQ ID NO: 195033 - DNA, 25 bp, Saccharomyces pastorianus
gaaacaactttgaaacccaagctag

SEQ ID NO: 195034 - DNA, 25 bp, Saccharomyces pastorianus
gcaacctgccacaaatgctacattg

SEQ ID NO: 195035 - DNA, 25 bp, Saccharomyces pastorianus
cccgcgaaagggaggttgtatcaga

SEQ ID NO: 195036 - DNA, 25 bp, Saccharomyces pastorianus
aatgtttattcatagacagcaatgg

SEQ ID NO: 195037 - DNA, 25 bp, Saccharomyces pastorianus
ggaggttgtatcagaaggcattcgt

SEQ ID NO: 195038 - DNA, 25 bp, Saccharomyces pastorianus
ctgccacaaatgctacattgagtag

SEQ ID NO: 195039 - DNA, 25 bp, Saccharomyces pastorianus
tttggcatcgcaacctgccacaaat

SEQ ID NO: 195040 - DNA, 25 bp, Saccharomyces pastorianus
aggcattcgtagaaatgtttattca

SEQ ID NO: 195041 - DNA, 25 bp, Saccharomyces pastorianus
gttcctgcagatttcactaactgaa

SEQ ID NO: 195042 - DNA, 25 bp, Saccharomyces pastorianus
tatattatgtccacgtctcaagcct

SEQ ID NO: 195043 - DNA, 25 bp, Saccharomyces pastorianus
ttggtccattggtattttttgtgta

SEQ ID NO: 195044 - DNA, 25 bp, Saccharomyces pastorianus
tagccggtgccgttttcgccgttga

SEQ ID NO: 195045 - DNA, 25 bp, Saccharomyces pastorianus
gttaatttttgtcactagagctgct

SEQ ID NO: 195046 - DNA, 25 bp, Saccharomyces pastorianus
tcgccgttgatattattgctaccat

SEQ ID NO: 195047 - DNA, 25 bp, Saccharomyces pastorianus
ttccattccatcgtggcagttagcc

SEQ ID NO: 195048 - DNA, 25 bp, Saccharomyces pastorianus
agtcgttcgtgtctggatttggtcc

SEQ ID NO: 195049 - DNA, 25 bp, Saccharomyces pastorianus
aatggtgtcatgttcctgcagattt

SEQ ID NO: 195050 - DNA, 25 bp, Saccharomyces pastorianus
gatattgtgtcagtcgttcgtgtct

SEQ ID NO: 195051 - DNA, 25 bp, Saccharomyces pastorianus
acgtctcaagcctttgataggttga

SEQ ID NO: 195052 - DNA, 25 bp, Saccharomyces pastorianus
ttgggaatcttacgactatgcaaag

SEQ ID NO: 195053 - DNA, 25 bp, Saccharomyces pastorianus
gggcctgggataagccagtttccgt

SEQ ID NO: 195054 - DNA, 25 bp, Saccharomyces pastorianus
agaattcatcaataacatgtgggcc

SEQ ID NO: 195055 - DNA, 25 bp, Saccharomyces pastorianus
tacgactatgcaaagttggatccaa

SEQ ID NO: 195056 - DNA, 25 bp, Saccharomyces pastorianus
ataagccagtttccgtcaatggcga

SEQ ID NO: 195057 - DNA, 25 bp, Saccharomyces pastorianus
tgaattgactttgactttcatgtcc

SEQ ID NO: 195058 - DNA, 25 bp, Saccharomyces pastorianus
caagattacgttccagctttcgatg

SEQ ID NO: 195059 - DNA, 25 bp, Saccharomyces pastorianus
ttccagctttcgatgtcgcaccaga

SEQ ID NO: 195060 - DNA, 25 bp, Saccharomyces pastorianus
gggccaagattacgttccagctttc

SEQ ID NO: 195061 - DNA, 25 bp, Saccharomyces pastorianus
gtcacctacaagtacaacgatgaat

SEQ ID NO: 195062 - DNA, 25 bp, Saccharomyces pastorianus
ttggatccaactaacgacgacgaca

SEQ ID NO: 195063 - DNA, 25 bp, Saccharomyces pastorianus
cttacaataattaccaccaccgtga

SEQ ID NO: 195064 - DNA, 25 bp, Saccharomyces pastorianus
tagcagcaccagcaacgggcttccg

SEQ ID NO: 195065 - DNA, 25 bp, Saccharomyces pastorianus
atggctattatgcaaagggttaccc

SEQ ID NO: 195066 - DNA, 25 bp, Saccharomyces pastorianus
acagcagtgcttatccatattccag

SEQ ID NO: 195067 - DNA, 25 bp, Saccharomyces pastorianus
catattccagcagccatacttacaa

SEQ ID NO: 195068 - DNA, 25 bp, Saccharomyces pastorianus
caatagatcatatcacagcagtgct

SEQ ID NO: 195069 - DNA, 25 bp, Saccharomyces pastorianus
atgagcgttggcagcaccagcagca

SEQ ID NO: 195070 - DNA, 25 bp, Saccharomyces pastorianus
gggaacagcagcactagcagcacca

SEQ ID NO: 195071 - DNA, 25 bp, Saccharomyces pastorianus
gctctagcagcagcgtcgtcaagaa

SEQ ID NO: 195072 - DNA, 25 bp, Saccharomyces pastorianus
ccaccttcagtatcgtctataacca

SEQ ID NO: 195073 - DNA, 25 bp, Saccharomyces pastorianus
gaagtaacagcgacggctctagcag

SEQ ID NO: 195074 - DNA, 25 bp, Saccharomyces pastorianus
gaacttgcatcgactgaaatatcca

SEQ ID NO: 195075 - DNA, 25 bp, Saccharomyces pastorianus
gataataaaccaattactcgcctgg

SEQ ID NO: 195076 - DNA, 25 bp, Saccharomyces pastorianus
aagtccacagaattccatcgattat

SEQ ID NO: 195077 - DNA, 25 bp, Saccharomyces pastorianus
aaagatgagtcaatgcacaacgcaa

SEQ ID NO: 195078 - DNA, 25 bp, Saccharomyces pastorianus
gatatcaccgatgaatctattacta

SEQ ID NO: 195079 - DNA, 25 bp, Saccharomyces pastorianus
gggacttggattacgtattttctga

SEQ ID NO: 195080 - DNA, 25 bp, Saccharomyces pastorianus
actggactcagtagatgtgtagata

SEQ ID NO: 195081 - DNA, 25 bp, Saccharomyces pastorianus
tactcgcctggaagatttgttcaca

SEQ ID NO: 195082 - DNA, 25 bp, Saccharomyces pastorianus
aaacccgaactaattcaggagcagt

SEQ ID NO: 195083 - DNA, 25 bp, Saccharomyces pastorianus
aaacgcaaaatacccatctcctagt

SEQ ID NO: 195084 - DNA, 25 bp, Saccharomyces pastorianus
aatctccgacagaattcgtagtaaa

SEQ ID NO: 195085 - DNA, 25 bp, Saccharomyces pastorianus
gtaaagctttggacacttcctcttt

SEQ ID NO: 195086 - DNA, 25 bp, Saccharomyces pastorianus
ggaattcccgaagtgttaccaaatg

SEQ ID NO: 195087 - DNA, 25 bp, Saccharomyces pastorianus
gaggccgcatcttgtaatttgctaa

SEQ ID NO: 195088 - DNA, 25 bp, Saccharomyces pastorianus
gtttatgcagaacagacatccgttt

SEQ ID NO: 195089 - DNA, 25 bp, Saccharomyces pastorianus
tccgtttctgaccttgttcaagcaa

SEQ ID NO: 195090 - DNA, 25 bp, Saccharomyces pastorianus
tacaattctagttgaggccgcatct

SEQ ID NO: 195091 - DNA, 25 bp, Saccharomyces pastorianus
cttcctcttttcatgatagcgtgtc

SEQ ID NO: 195092 - DNA, 25 bp, Saccharomyces pastorianus
ttaggctctgttccacatgagaaag

SEQ ID NO: 195093 - DNA, 25 bp, Saccharomyces pastorianus
ttttttcctcttagagtggctatac

SEQ ID NO: 195094 - DNA, 25 bp, Saccharomyces pastorianus
ggtgacatatatttacacgctagtt

SEQ ID NO: 195095 - DNA, 25 bp, Saccharomyces pastorianus
aaacgtgtgcaactcttaggctctg

SEQ ID NO: 195096 - DNA, 25 bp, Saccharomyces pastorianus
ggaagatgggctgggtctaacacaa

SEQ ID NO: 195097 - DNA, 25 bp, Saccharomyces pastorianus
tggcctgtccacgtaatgagagcaa

SEQ ID NO: 195098 - DNA, 25 bp, Saccharomyces pastorianus
gaggtttcatgcagcaatatcgata

SEQ ID NO: 195099 - DNA, 25 bp, Saccharomyces pastorianus
gggaaaagcgttaccagctgcagat

SEQ ID NO: 195100 - DNA, 25 bp, Saccharomyces pastorianus
aaagggcagacaccactgtgacatg

SEQ ID NO: 195101 - DNA, 25 bp, Saccharomyces pastorianus
ccagctgcagatgatgaggtttcat

SEQ ID NO: 195102 - DNA, 25 bp, Saccharomyces pastorianus
gaattcccagaatgacacaagtaat

SEQ ID NO: 195103 - DNA, 25 bp, Saccharomyces pastorianus
ccacccaacaatctacatttgcaaa

SEQ ID NO: 195104 - DNA, 25 bp, Saccharomyces pastorianus
gtaatgaaactgaagaccccaccca

SEQ ID NO: 195105 - DNA, 25 bp, Saccharomyces pastorianus
gtacgactcatgaagtggcctgtcc

SEQ ID NO: 195106 - DNA, 25 bp, Saccharomyces pastorianus
atatgcaaggtctgttgaattccca

SEQ ID NO: 195107 - DNA, 25 bp, Saccharomyces pastorianus
tagtagagtaggatgggtaaccgta

SEQ ID NO: 195108 - DNA, 25 bp, Saccharomyces pastorianus
gttcatagccttaaccaatttattg

SEQ ID NO: 195109 - DNA, 25 bp, Saccharomyces pastorianus
acctctcttgtagaccaattgtcta

SEQ ID NO: 195110 - DNA, 25 bp, Saccharomyces pastorianus
ggcttcgatgatagcattgtcggac

SEQ ID NO: 195111 - DNA, 25 bp, Saccharomyces pastorianus
aatcgtcaatggacaagataccata

SEQ ID NO: 195112 - DNA, 25 bp, Saccharomyces pastorianus
ttgccacacggaataatgttagttc

SEQ ID NO: 195113 - DNA, 25 bp, Saccharomyces pastorianus
acccaagttggcttcgatgatagca

SEQ ID NO: 195114 - DNA, 25 bp, Saccharomyces pastorianus
aatgttagttcatagccttaaccaa

SEQ ID NO: 195115 - DNA, 25 bp, Saccharomyces pastorianus
atacttacccaagttggcttcgatg

SEQ ID NO: 195116 - DNA, 25 bp, Saccharomyces pastorianus
gataccatacttacccaagttggct

SEQ ID NO: 195117 - DNA, 25 bp, Saccharomyces pastorianus
atacattgagattattgccacacgg

SEQ ID NO: 195118 - DNA, 25 bp, Saccharomyces pastorianus
aaataatctaagttacctgatacaa

SEQ ID NO: 195119 - DNA, 25 bp, Saccharomyces pastorianus
atctaagttacctgatacaagaact

SEQ ID NO: 195120 - DNA, 25 bp, Saccharomyces pastorianus
ttattaaataatctaagttacctga

SEQ ID NO: 195121 - DNA, 25 bp, Saccharomyces pastorianus
taatctaagttacctgatacaagaa

SEQ ID NO: 195122 - DNA, 25 bp, Saccharomyces pastorianus
ataatctaagttacctgatacaaga

SEQ ID NO: 195123 - DNA, 25 bp, Saccharomyces pastorianus
tattaaataatctaagttacctgat

SEQ ID NO: 195124 - DNA, 25 bp, Saccharomyces pastorianus
aataatctaagttacctgatacaag

SEQ ID NO: 195125 - DNA, 25 bp, Saccharomyces pastorianus
ttaaataatctaagttacctgatac

SEQ ID NO: 195126 - DNA, 25 bp, Saccharomyces pastorianus
attaaataatctaagttacctgata

SEQ ID NO: 195127 - DNA, 25 bp, Saccharomyces pastorianus
taaataatctaagttacctgataca

SEQ ID NO: 195128 - DNA, 25 bp, Saccharomyces pastorianus
aatctaagttacctgatacaagaac

SEQ ID NO: 195129 - DNA, 25 bp, Saccharomyces pastorianus
ataggaatcctcaaaatggaatcta

SEQ ID NO: 195130 - DNA, 25 bp, Saccharomyces pastorianus
cgaggatataggaatcctcaaaatg

SEQ ID NO: 195131 - DNA, 25 bp, Saccharomyces pastorianus
gaaggctataatattaggtatacag

SEQ ID NO: 195132 - DNA, 25 bp, Saccharomyces pastorianus
aaggctataatattaggtatacaga

SEQ ID NO: 195133 - DNA, 25 bp, Saccharomyces pastorianus
aggctataatattaggtatacagaa

SEQ ID NO: 195134 - DNA, 25 bp, Saccharomyces pastorianus
acatactaatattacgaatattcct

SEQ ID NO: 195135 - DNA, 25 bp, Saccharomyces pastorianus
tataggaatcctcaaaatggaatct

SEQ ID NO: 195136 - DNA, 25 bp, Saccharomyces pastorianus
gaggatataggaatcctcaaaatgg

SEQ ID NO: 195137 - DNA, 25 bp, Saccharomyces pastorianus
ggatataggaatcctcaaaatggaa

SEQ ID NO: 195138 - DNA, 25 bp, Saccharomyces pastorianus
ggctataatattaggtatacagaat

SEQ ID NO: 195139 - DNA, 25 bp, Saccharomyces pastorianus
aggatataggaatcctcaaaatgga

SEQ ID NO: 195140 - DNA, 25 bp, Saccharomyces pastorianus
agcgtcaccaccaagtcaattactg

SEQ ID NO: 195141 - DNA, 25 bp, Saccharomyces pastorianus
gacatctcccggtgcattgaacaat

SEQ ID NO: 195142 - DNA, 25 bp, Saccharomyces pastorianus
aaatagcatgatctctacgccttcc

SEQ ID NO: 195143 - DNA, 25 bp, Saccharomyces pastorianus
aggaatgaccttccagatacctctc

SEQ ID NO: 195144 - DNA, 25 bp, Saccharomyces pastorianus
gttcctcagtcaataaactctccga

SEQ ID NO: 195145 - DNA, 25 bp, Saccharomyces pastorianus
tgatggacccttcaaacctagctga

SEQ ID NO: 195146 - DNA, 25 bp, Saccharomyces pastorianus
tatggcaccaacaaccgtagcgaca

SEQ ID NO: 195147 - DNA, 25 bp, Saccharomyces pastorianus
atcgccatcatccaattacattact

SEQ ID NO: 195148 - DNA, 25 bp, Saccharomyces pastorianus
taaactctcagccatcatcgatagc

SEQ ID NO: 195149 - DNA, 25 bp, Saccharomyces pastorianus
agttctattcattcagttcctcagt

SEQ ID NO: 195150 - DNA, 25 bp, Saccharomyces pastorianus
attactgacagacctttcactcgaa

SEQ ID NO: 195151 - DNA, 25 bp, Saccharomyces pastorianus
gccgctcttcagtttccgaagtaaa

SEQ ID NO: 195152 - DNA, 25 bp, Saccharomyces pastorianus
tcatttttctatcctcaaaggaaaa

SEQ ID NO: 195153 - DNA, 25 bp, Saccharomyces pastorianus
tatcctcaaaggaaaatcttttctg

SEQ ID NO: 195154 - DNA, 25 bp, Saccharomyces pastorianus
aaacaactttatttgcccacacgct

SEQ ID NO: 195155 - DNA, 25 bp, Saccharomyces pastorianus
ttctgcgaaatttctagccgctctt

SEQ ID NO: 195156 - DNA, 25 bp, Saccharomyces pastorianus
gcgaaatttctagccgctcttcagt

SEQ ID NO: 195157 - DNA, 25 bp, Saccharomyces pastorianus
tagccgctcttcagtttccgaagta

SEQ ID NO: 195158 - DNA, 25 bp, Saccharomyces pastorianus
tttatttgcccacacgctgttatag

SEQ ID NO: 195159 - DNA, 25 bp, Saccharomyces pastorianus
ttcagtttccgaagtaaagtcgctg

SEQ ID NO: 195160 - DNA, 25 bp, Saccharomyces pastorianus
atcttttctgcgaaatttctagccg

SEQ ID NO: 195161 - DNA, 25 bp, Saccharomyces pastorianus
tttgcccacacgctgttataggctt

SEQ ID NO: 195162 - DNA, 25 bp, Saccharomyces pastorianus
gatgacacacaactcttgacctact

SEQ ID NO: 195163 - DNA, 25 bp, Saccharomyces pastorianus
gattccattctactggtttttgaaa

SEQ ID NO: 195164 - DNA, 25 bp, Saccharomyces pastorianus
acctactggattgtcttttcatttt

SEQ ID NO: 195165 - DNA, 25 bp, Saccharomyces pastorianus
attctggtccaaggcaattctatat

SEQ ID NO: 195166 - DNA, 25 bp, Saccharomyces pastorianus
acattgccttgcctcaaactggtgg

SEQ ID NO: 195167 - DNA, 25 bp, Saccharomyces pastorianus
ttaatctacattgccttgcctcaaa

SEQ ID NO: 195168 - DNA, 25 bp, Saccharomyces pastorianus
acacaactcttgacctactggattg

SEQ ID NO: 195169 - DNA, 25 bp, Saccharomyces pastorianus
tgaaaaccgttttcttaatctacat

SEQ ID NO: 195170 - DNA, 25 bp, Saccharomyces pastorianus
gtcttttcatttttgagtgtcattg

SEQ ID NO: 195171 - DNA, 25 bp, Saccharomyces pastorianus
ggtggcgctagaatgatctatcaaa

SEQ ID NO: 195172 - DNA, 25 bp, Saccharomyces pastorianus
cttgcctcaaactggtggcgctaga

SEQ ID NO: 195173 - DNA, 25 bp, Saccharomyces pastorianus
ggatcactgtaattcgatagggtac

SEQ ID NO: 195174 - DNA, 25 bp, Saccharomyces pastorianus
ctcgacctatttagaatttccttca

SEQ ID NO: 195175 - DNA, 25 bp, Saccharomyces pastorianus
ttcgaaacactaaacctcgacctat

SEQ ID NO: 195176 - DNA, 25 bp, Saccharomyces pastorianus
atgcttgtataatcaccaattcgaa

SEQ ID NO: 195177 - DNA, 25 bp, Saccharomyces pastorianus
gacagaattccacagacttttacga

SEQ ID NO: 195178 - DNA, 25 bp, Saccharomyces pastorianus
tagtcttacgaaactgttcagtgca

SEQ ID NO: 195179 - DNA, 25 bp, Saccharomyces pastorianus
gggaactttcattcatatacctgaa

SEQ ID NO: 195180 - DNA, 25 bp, Saccharomyces pastorianus
aaatgtctgctttatgggaactttc

SEQ ID NO: 195181 - DNA, 25 bp, Saccharomyces pastorianus
gaatttccttcaagatttactaaca

SEQ ID NO: 195182 - DNA, 25 bp, Saccharomyces pastorianus
acatgaagttgaacaccatatctca

SEQ ID NO: 195183 - DNA, 25 bp, Saccharomyces pastorianus
gaaggtggcaaactagtcttacgaa

SEQ ID NO: 195184 - DNA, 25 bp, Saccharomyces pastorianus
actacattgcacgattgcaagaggg

SEQ ID NO: 195185 - DNA, 25 bp, Saccharomyces pastorianus
aataaacctatgattcttgtcggac

SEQ ID NO: 195186 - DNA, 25 bp, Saccharomyces pastorianus
gcactaactacattgcacgattgca

SEQ ID NO: 195187 - DNA, 25 bp, Saccharomyces pastorianus
gaattaacagttgcgatagtaaaat

SEQ ID NO: 195188 - DNA, 25 bp, Saccharomyces pastorianus
ttcgaagaggaatttgcactaacta

SEQ ID NO: 195189 - DNA, 25 bp, Saccharomyces pastorianus
gaatttgcactaactacattgcacg

SEQ ID NO: 195190 - DNA, 25 bp, Saccharomyces pastorianus
gggatcctaatattgaattaacagt

SEQ ID NO: 195191 - DNA, 25 bp, Saccharomyces pastorianus
ggccctggggatcctaatattgaat

SEQ ID NO: 195192 - DNA, 25 bp, Saccharomyces pastorianus
taaacctatgattcttgtcggaccg

SEQ ID NO: 195193 - DNA, 25 bp, Saccharomyces pastorianus
agaggaatttgcactaactacattg

SEQ ID NO: 195194 - DNA, 25 bp, Saccharomyces pastorianus
tactctatatctagcggccctgggg

SEQ ID NO: 195195 - DNA, 25 bp, Saccharomyces pastorianus
gcctttagcccataccgaattgttt

SEQ ID NO: 195196 - DNA, 25 bp, Saccharomyces pastorianus
gttttgccatttgttgcatttgtgg

SEQ ID NO: 195197 - DNA, 25 bp, Saccharomyces pastorianus
atattcaaatggtggcctttagccc

SEQ ID NO: 195198 - DNA, 25 bp, Saccharomyces pastorianus
ataccaggcatattcggcataccag

SEQ ID NO: 195199 - DNA, 25 bp, Saccharomyces pastorianus
ttttgcttcagcttttgttgtgcct

SEQ ID NO: 195200 - DNA, 25 bp, Saccharomyces pastorianus
ggagtcacttttggcataccaggca

SEQ ID NO: 195201 - DNA, 25 bp, Saccharomyces pastorianus
tccgccaccaaacatgttcatcata

SEQ ID NO: 195202 - DNA, 25 bp, Saccharomyces pastorianus
tgctgcatcatttgtggagtcactt

SEQ ID NO: 195203 - DNA, 25 bp, Saccharomyces pastorianus
attagacctggattttgcttcagct

SEQ ID NO: 195204 - DNA, 25 bp, Saccharomyces pastorianus
gtgcctgctgcatcatttgtggagt

SEQ ID NO: 195205 - DNA, 25 bp, Saccharomyces pastorianus
cggcataccaggcatgtttggcata

SEQ ID NO: 195206 - DNA, 25 bp, Saccharomyces pastorianus
gtcccgccatcagtttgatctaata

SEQ ID NO: 195207 - DNA, 25 bp, Saccharomyces pastorianus
gtgtacagacaggtcttctttgtga

SEQ ID NO: 195208 - DNA, 25 bp, Saccharomyces pastorianus
cagtttgatctaataatgtgcctaa

SEQ ID NO: 195209 - DNA, 25 bp, Saccharomyces pastorianus
gcagcctggtgtacagacaggtctt

SEQ ID NO: 195210 - DNA, 25 bp, Saccharomyces pastorianus
taatgtgcctaaagcagcctggtgt

SEQ ID NO: 195211 - DNA, 25 bp, Saccharomyces pastorianus
gcctaaagcagcctggtgtacagac

SEQ ID NO: 195212 - DNA, 25 bp, Saccharomyces pastorianus
tgtgcctaaagcagcctggtgtaca

SEQ ID NO: 195213 - DNA, 25 bp, Saccharomyces pastorianus
cagacaggtcttctttgtgaaaaat

SEQ ID NO: 195214 - DNA, 25 bp, Saccharomyces pastorianus
caggtcttctttgtgaaaaatgtga

SEQ ID NO: 195215 - DNA, 25 bp, Saccharomyces pastorianus
atgtcccgccatcagtttgatctaa

SEQ ID NO: 195216 - DNA, 25 bp, Saccharomyces pastorianus
gcctggtgtacagacaggtcttctt

SEQ ID NO: 195217 - DNA, 25 bp, Saccharomyces pastorianus
tgtttcggttgcgttcttggataac

SEQ ID NO: 195218 - DNA, 25 bp, Saccharomyces pastorianus
gtttcggttgcgttcttggataacg

SEQ ID NO: 195219 - DNA, 25 bp, Saccharomyces pastorianus
ttcggttgcgttcttggataacgac

SEQ ID NO: 195220 - DNA, 25 bp, Saccharomyces pastorianus
aaattgtgtcattgatagagttaat

SEQ ID NO: 195221 - DNA, 25 bp, Saccharomyces pastorianus
gcgcatttggtgtttcggttgcgtt

SEQ ID NO: 195222 - DNA, 25 bp, Saccharomyces pastorianus
tttcggttgcgttcttggataacga

SEQ ID NO: 195223 - DNA, 25 bp, Saccharomyces pastorianus
cattgatagagttaatgggatcgta

SEQ ID NO: 195224 - DNA, 25 bp, Saccharomyces pastorianus
ggtgtttcggttgcgttcttggata

SEQ ID NO: 195225 - DNA, 25 bp, Saccharomyces pastorianus
cgcatttggtgtttcggttgcgttc

SEQ ID NO: 195226 - DNA, 25 bp, Saccharomyces pastorianus
atagagttaatgggatcgtagagac

SEQ ID NO: 195227 - DNA, 25 bp, Saccharomyces pastorianus
ataagcaactaaattgtgtcattga

SEQ ID NO: 195228 - DNA, 25 bp, Saccharomyces pastorianus
aaccaaccatattacaagtcacaaa

SEQ ID NO: 195229 - DNA, 25 bp, Saccharomyces pastorianus
gtaaccaaccatattacaagtcaca

SEQ ID NO: 195230 - DNA, 25 bp, Saccharomyces pastorianus
tggtaaccaaccatattacaagtca

SEQ ID NO: 195231 - DNA, 25 bp, Saccharomyces pastorianus
atggtaaccaaccatattacaagtc

SEQ ID NO: 195232 - DNA, 25 bp, Saccharomyces pastorianus
tatggtaaccaaccatattacaagt

SEQ ID NO: 195233 - DNA, 25 bp, Saccharomyces pastorianus
accaaccatattacaagtcacaaat

SEQ ID NO: 195234 - DNA, 25 bp, Saccharomyces pastorianus
ggtaaccaaccatattacaagtcac

SEQ ID NO: 195235 - DNA, 25 bp, Saccharomyces pastorianus
taaccaaccatattacaagtcacaa

SEQ ID NO: 195236 - DNA, 25 bp, Saccharomyces pastorianus
gtgatcatcatcaaggctcgagacc

SEQ ID NO: 195237 - DNA, 25 bp, Saccharomyces pastorianus
aaaactcgccaaatgactctagata

SEQ ID NO: 195238 - DNA, 25 bp, Saccharomyces pastorianus
cagcagcccctgcaggagttaatag

SEQ ID NO: 195239 - DNA, 25 bp, Saccharomyces pastorianus
ggtaattcaaatgagtcccggtaca

SEQ ID NO: 195240 - DNA, 25 bp, Saccharomyces pastorianus
atcccgtaaatcgatttcatcctga

SEQ ID NO: 195241 - DNA, 25 bp, Saccharomyces pastorianus
atatgctaaaactgcgattccaccg

SEQ ID NO: 195242 - DNA, 25 bp, Saccharomyces pastorianus
aatcctagaccgtatcatgtgaaca

SEQ ID NO: 195243 - DNA, 25 bp, Saccharomyces pastorianus
gggcctcagtcaagataccagggta

SEQ ID NO: 195244 - DNA, 25 bp, Saccharomyces pastorianus
gttctcgcaatatggctggtgatca

SEQ ID NO: 195245 - DNA, 25 bp, Saccharomyces pastorianus
ataatccttcaaacggttctcgcaa

SEQ ID NO: 195246 - DNA, 25 bp, Saccharomyces pastorianus
gccaagaatccaatgcgccaatcaa

SEQ ID NO: 195247 - DNA, 25 bp, Saccharomyces pastorianus
taatgcgaccgcagcattttacgct

SEQ ID NO: 195248 - DNA, 25 bp, Saccharomyces pastorianus
ggaaggctccaatctttatccgatt

SEQ ID NO: 195249 - DNA, 25 bp, Saccharomyces pastorianus
gcaattatcaatttcagggcaccat

SEQ ID NO: 195250 - DNA, 25 bp, Saccharomyces pastorianus
atctcagccgctagggttgccttaa

SEQ ID NO: 195251 - DNA, 25 bp, Saccharomyces pastorianus
aagctatcaactccagaattcccac

SEQ ID NO: 195252 - DNA, 25 bp, Saccharomyces pastorianus
accatgatcccgtttgacttgagaa

SEQ ID NO: 195253 - DNA, 25 bp, Saccharomyces pastorianus
aaaattttggttcactctgcactgc

SEQ ID NO: 195254 - DNA, 25 bp, Saccharomyces pastorianus
accagatgcagatcattcttcagga

SEQ ID NO: 195255 - DNA, 25 bp, Saccharomyces pastorianus
accgtggctcctactacaaatgtgg

SEQ ID NO: 195256 - DNA, 25 bp, Saccharomyces pastorianus
aaaatcgtgttcttttcttgacata

SEQ ID NO: 195257 - DNA, 25 bp, Saccharomyces pastorianus
agttagccattttgatctcagccgc

SEQ ID NO: 195258 - DNA, 25 bp, Saccharomyces pastorianus
aggctctaactttcaaagctcctcg

SEQ ID NO: 195259 - DNA, 25 bp, Saccharomyces pastorianus
ctccaatttccaaggctcttccaga

SEQ ID NO: 195260 - DNA, 25 bp, Saccharomyces pastorianus
tgactggagtgcagccagaggttcc

SEQ ID NO: 195261 - DNA, 25 bp, Saccharomyces pastorianus
tgactggagtgcagctagaggctct

SEQ ID NO: 195262 - DNA, 25 bp, Saccharomyces pastorianus
acaaggataggtctctaactaacaa

SEQ ID NO: 195263 - DNA, 25 bp, Saccharomyces pastorianus
tgctcagtttggtaagcctcaacaa

SEQ ID NO: 195264 - DNA, 25 bp, Saccharomyces pastorianus
gaggttccaatttccaaggctcttc

SEQ ID NO: 195265 - DNA, 25 bp, Saccharomyces pastorianus
aagactactgatgagcaaccaaaaa

SEQ ID NO: 195266 - DNA, 25 bp, Saccharomyces pastorianus
gctgccagaggtgctcagtttggta

SEQ ID NO: 195267 - DNA, 25 bp, Saccharomyces pastorianus
gatgcggcagttgaaaagctacagg

SEQ ID NO: 195268 - DNA, 25 bp, Saccharomyces pastorianus
ggataaaactgctcaattgactgtt

SEQ ID NO: 195269 - DNA, 25 bp, Saccharomyces pastorianus
acaggttgccttgccaggacgaata

SEQ ID NO: 195270 - DNA, 25 bp, Saccharomyces pastorianus
acaggcagcctaccagatgaatatg

SEQ ID NO: 195271 - DNA, 25 bp, Saccharomyces pastorianus
tactcttttggcgaaaccactcttc

SEQ ID NO: 195272 - DNA, 25 bp, Saccharomyces pastorianus
tgcggtagcattggacaagcctatt

SEQ ID NO: 195273 - DNA, 25 bp, Saccharomyces pastorianus
aagactatctccctataatgcggta

SEQ ID NO: 195274 - DNA, 25 bp, Saccharomyces pastorianus
gccgagccgccactatagtatatga

SEQ ID NO: 195275 - DNA, 25 bp, Saccharomyces pastorianus
ggcactatggctttgtatgatgttt

SEQ ID NO: 195276 - DNA, 25 bp, Saccharomyces pastorianus
gttacgatcccgcagtacaaacttt

SEQ ID NO: 195277 - DNA, 25 bp, Saccharomyces pastorianus
acatattcgaggttgactttcctga

SEQ ID NO: 195278 - DNA, 25 bp, Saccharomyces pastorianus
acgaagcagaggttgccctaaggca

SEQ ID NO: 195279 - DNA, 25 bp, Saccharomyces pastorianus
agttaaatctgacctcatctgtgag

SEQ ID NO: 195280 - DNA, 25 bp, Saccharomyces pastorianus
atcgatcttccagattctttagaga

SEQ ID NO: 195281 - DNA, 25 bp, Saccharomyces pastorianus
ggcgcaaccggatactacgaatgtt

SEQ ID NO: 195282 - DNA, 25 bp, Saccharomyces pastorianus
gaaggtcaacaacccgttacatcac

SEQ ID NO: 195283 - DNA, 25 bp, Saccharomyces pastorianus
cgttacatcacaggagggacaatct

SEQ ID NO: 195284 - DNA, 25 bp, Saccharomyces pastorianus
agattggcgcaaccggatactacga

SEQ ID NO: 195285 - DNA, 25 bp, Saccharomyces pastorianus
cgaatgttcggccaagactggttat

SEQ ID NO: 195286 - DNA, 25 bp, Saccharomyces pastorianus
gaagtctacgtaccaactgtctttg

SEQ ID NO: 195287 - DNA, 25 bp, Saccharomyces pastorianus
gtagcagaccagattggcgcaaccg

SEQ ID NO: 195288 - DNA, 25 bp, Saccharomyces pastorianus
ggccaagactggttatggtgtcaga

SEQ ID NO: 195289 - DNA, 25 bp, Saccharomyces pastorianus
tttctctatcgatcttccagattct

SEQ ID NO: 195290 - DNA, 25 bp, Saccharomyces pastorianus
acaggagggacaatctgtagcagac

SEQ ID NO: 195291 - DNA, 25 bp, Saccharomyces pastorianus
atgctcgcatacttagggataactt

SEQ ID NO: 195292 - DNA, 25 bp, Saccharomyces pastorianus
tggacatgcaagatttgttctaagt

SEQ ID NO: 195293 - DNA, 25 bp, Saccharomyces pastorianus
caccagggtttatcaatgctcgcat

SEQ ID NO: 195294 - DNA, 25 bp, Saccharomyces pastorianus
gaggttggaggctcagttaaaacta

SEQ ID NO: 195295 - DNA, 25 bp, Saccharomyces pastorianus
gaatgaaatccttgttaaatctttg

SEQ ID NO: 195296 - DNA, 25 bp, Saccharomyces pastorianus
aaataggtgcgtggactctggacat

SEQ ID NO: 195297 - DNA, 25 bp, Saccharomyces pastorianus
atcgctagaaatatgaaccttccaa

SEQ ID NO: 195298 - DNA, 25 bp, Saccharomyces pastorianus
aaatctttgaaattcatcgctagaa

SEQ ID NO: 195299 - DNA, 25 bp, Saccharomyces pastorianus
tgcattgccaaactacatgagatct

SEQ ID NO: 195300 - DNA, 25 bp, Saccharomyces pastorianus
gcgtggactctggacatgcaagatt

SEQ ID NO: 195301 - DNA, 25 bp, Saccharomyces pastorianus
tataaaaaccaagctaccaccaggg

SEQ ID NO: 195302 - DNA, 25 bp, Saccharomyces pastorianus
actggcttggttactatcgatatgt

SEQ ID NO: 195303 - DNA, 25 bp, Saccharomyces pastorianus
tacaacgaacttttggaccttggat

SEQ ID NO: 195304 - DNA, 25 bp, Saccharomyces pastorianus
aaagtggaacctgcacatcgtgcct

SEQ ID NO: 195305 - DNA, 25 bp, Saccharomyces pastorianus
ccgctcccaactgtcgattattgaa

SEQ ID NO: 195306 - DNA, 25 bp, Saccharomyces pastorianus
gacaagtacgattatctggccaaag

SEQ ID NO: 195307 - DNA, 25 bp, Saccharomyces pastorianus
gatcaattggacgttcgagcaggtt

SEQ ID NO: 195308 - DNA, 25 bp, Saccharomyces pastorianus
ggccaagaccgagtgtggaattcat

SEQ ID NO: 195309 - DNA, 25 bp, Saccharomyces pastorianus
atcgtgcctacaaagagctacatat

SEQ ID NO: 195310 - DNA, 25 bp, Saccharomyces pastorianus
ataagtgctgtgtttactggtagaa

SEQ ID NO: 195311 - DNA, 25 bp, Saccharomyces pastorianus
ggcagattttgcctcgaaatacggg

SEQ ID NO: 195312 - DNA, 25 bp, Saccharomyces pastorianus
attcacgtatataagccggatggat

SEQ ID NO: 195313 - DNA, 25 bp, Saccharomyces pastorianus
ttaagagattcacttgctgacaaga

SEQ ID NO: 195314 - DNA, 25 bp, Saccharomyces pastorianus
gcttgtctaaggtggacattccctt

SEQ ID NO: 195315 - DNA, 25 bp, Saccharomyces pastorianus
gattttcctggtactccagaagcca

SEQ ID NO: 195316 - DNA, 25 bp, Saccharomyces pastorianus
actactcaagaccaagtggcttcga

SEQ ID NO: 195317 - DNA, 25 bp, Saccharomyces pastorianus
ggtgtctcgatatatgattttcctg

SEQ ID NO: 195318 - DNA, 25 bp, Saccharomyces pastorianus
gcaagaactggccactactcaagac

SEQ ID NO: 195319 - DNA, 25 bp, Saccharomyces pastorianus
gagaagcaacgatcctcaatccagc

SEQ ID NO: 195320 - DNA, 25 bp, Saccharomyces pastorianus
gatcctcaatccagcttgtctaagg

SEQ ID NO: 195321 - DNA, 25 bp, Saccharomyces pastorianus
agtggcttcgattattgagtccttc

SEQ ID NO: 195322 - DNA, 25 bp, Saccharomyces pastorianus
tgagtccttcgttgaattaggtgtc

SEQ ID NO: 195323 - DNA, 25 bp, Saccharomyces pastorianus
agaaatgtggatcgcttgtacaagc

SEQ ID NO: 195324 - DNA, 25 bp, Saccharomyces pastorianus
gtcctatcggcatttggtgtagtaa

SEQ ID NO: 195325 - DNA, 25 bp, Saccharomyces pastorianus
gtcattgctcatctcttcaacacaa

SEQ ID NO: 195326 - DNA, 25 bp, Saccharomyces pastorianus
atcggcatttggtgtagtaattctt

SEQ ID NO: 195327 - DNA, 25 bp, Saccharomyces pastorianus
ggtgtagtaattctttccgtcattg

SEQ ID NO: 195328 - DNA, 25 bp, Saccharomyces pastorianus
tttggtgtagtaattctttccgtca

SEQ ID NO: 195329 - DNA, 25 bp, Saccharomyces pastorianus
gtagtaattctttccgtcattgctc

SEQ ID NO: 195330 - DNA, 25 bp, Saccharomyces pastorianus
gagacccgttgtatccactggtaag

SEQ ID NO: 195331 - DNA, 25 bp, Saccharomyces pastorianus
gacccgttgtatccactggtaaggc

SEQ ID NO: 195332 - DNA, 25 bp, Saccharomyces pastorianus
atgagacccgttgtatccactggta

SEQ ID NO: 195333 - DNA, 25 bp, Saccharomyces pastorianus
taattctttccgtcattgctcatct

SEQ ID NO: 195334 - DNA, 25 bp, Saccharomyces pastorianus
tttccgtcattgctcatctcttcaa

SEQ ID NO: 195335 - DNA, 25 bp, Saccharomyces pastorianus
tgttaccgtctggaaaccgaataag

SEQ ID NO: 195336 - DNA, 25 bp, Saccharomyces pastorianus
cgcttgtcgggctctcaaaggaaga

SEQ ID NO: 195337 - DNA, 25 bp, Saccharomyces pastorianus
gatcccgaagtagcagatacccttt

SEQ ID NO: 195338 - DNA, 25 bp, Saccharomyces pastorianus
atacccttttgtgtgggatgggcga

SEQ ID NO: 195339 - DNA, 25 bp, Saccharomyces pastorianus
tagagtccgatagcgacgaacccct

SEQ ID NO: 195340 - DNA, 25 bp, Saccharomyces pastorianus
gatctagattttgaataccgtgttg

SEQ ID NO: 195341 - DNA, 25 bp, Saccharomyces pastorianus
atgggcgagggtattgttaccgtct

SEQ ID NO: 195342 - DNA, 25 bp, Saccharomyces pastorianus
ggttgtttcgtcgatcccgaagtag

SEQ ID NO: 195343 - DNA, 25 bp, Saccharomyces pastorianus
ctctcccactctgatgaggatctaa

SEQ ID NO: 195344 - DNA, 25 bp, Saccharomyces pastorianus
gatgaaacgacgcttgtcgggctct

SEQ ID NO: 195345 - DNA, 25 bp, Saccharomyces pastorianus
aggacctcaaggaagatcatcaaga

SEQ ID NO: 195346 - DNA, 25 bp, Saccharomyces pastorianus
ttttttgcggtgtttgcttctagct

SEQ ID NO: 195347 - DNA, 25 bp, Saccharomyces pastorianus
taccagtggatacaacgggtctcat

SEQ ID NO: 195348 - DNA, 25 bp, Saccharomyces pastorianus
gagtcgcgtgcaaagcgataagcaa

SEQ ID NO: 195349 - DNA, 25 bp, Saccharomyces pastorianus
gatgcagtttctaactcaattagtt

SEQ ID NO: 195350 - DNA, 25 bp, Saccharomyces pastorianus
gaattactacaccaaatgccgatag

SEQ ID NO: 195351 - DNA, 25 bp, Saccharomyces pastorianus
gcagcatctttattatgcagcgttg

SEQ ID NO: 195352 - DNA, 25 bp, Saccharomyces pastorianus
gcttctagctttgtcctttatcgta

SEQ ID NO: 195353 - DNA, 25 bp, Saccharomyces pastorianus
ttatcgtagaggttcttgctttgaa

SEQ ID NO: 195354 - DNA, 25 bp, Saccharomyces pastorianus
gcagcgttgatgcagtttctaactc

SEQ ID NO: 195355 - DNA, 25 bp, Saccharomyces pastorianus
gctttgaaagctacctattcttttc

SEQ ID NO: 195356 - DNA, 25 bp, Saccharomyces pastorianus
aatgatcctgaacagcagcatcttt

SEQ ID NO: 195357 - DNA, 25 bp, Saccharomyces pastorianus
atttggctgccttggtatacctcgt

SEQ ID NO: 195358 - DNA, 25 bp, Saccharomyces pastorianus
gtttatagtgttgcacatactgttt

SEQ ID NO: 195359 - DNA, 25 bp, Saccharomyces pastorianus
gctgccttggtatacctcgtgtttt

SEQ ID NO: 195360 - DNA, 25 bp, Saccharomyces pastorianus
tctcctccttactaacaattatatt

SEQ ID NO: 195361 - DNA, 25 bp, Saccharomyces pastorianus
ggctgccttggtatacctcgtgttt

SEQ ID NO: 195362 - DNA, 25 bp, Saccharomyces pastorianus
tatttggctgccttggtatacctcg

SEQ ID NO: 195363 - DNA, 25 bp, Saccharomyces pastorianus
ccctattgtttatagtgttgcacat

SEQ ID NO: 195364 - DNA, 25 bp, Saccharomyces pastorianus
taacaattatattttaaccctattg

SEQ ID NO: 195365 - DNA, 25 bp, Saccharomyces pastorianus
aaccctattgtttatagtgttgcac

SEQ ID NO: 195366 - DNA, 25 bp, Saccharomyces pastorianus
tatagtgttgcacatactgtttatt

SEQ ID NO: 195367 - DNA, 25 bp, Saccharomyces pastorianus
ttggctgccttggtatacctcgtgt

SEQ ID NO: 195368 - DNA, 25 bp, Saccharomyces pastorianus
gatttgcccaagttacgatccagca

SEQ ID NO: 195369 - DNA, 25 bp, Saccharomyces pastorianus
gtagaaacttctccaacaaagcaga

SEQ ID NO: 195370 - DNA, 25 bp, Saccharomyces pastorianus
atagtattacctgagctacgtcccg

SEQ ID NO: 195371 - DNA, 25 bp, Saccharomyces pastorianus
gaagctctatcattgcggaataacc

SEQ ID NO: 195372 - DNA, 25 bp, Saccharomyces pastorianus
aaccgagcctgttttagagtcctca

SEQ ID NO: 195373 - DNA, 25 bp, Saccharomyces pastorianus
gagcatctaatactctaccagaact

SEQ ID NO: 195374 - DNA, 25 bp, Saccharomyces pastorianus
gaataacctgaagaaacggccacca

SEQ ID NO: 195375 - DNA, 25 bp, Saccharomyces pastorianus
ggaggacagtattccagaagcaata

SEQ ID NO: 195376 - DNA, 25 bp, Saccharomyces pastorianus
taccagaacttagcggtgttaacac

SEQ ID NO: 195377 - DNA, 25 bp, Saccharomyces pastorianus
gaaaactcaatcgatttgcccaagt

SEQ ID NO: 195378 - DNA, 25 bp, Saccharomyces pastorianus
agaagcctgcaatccctcagaaaaa

SEQ ID NO: 195379 - DNA, 25 bp, Saccharomyces pastorianus
ggactagtacattaccagcgcatct

SEQ ID NO: 195380 - DNA, 25 bp, Saccharomyces pastorianus
aggaaagcatctctgggactccgac

SEQ ID NO: 195381 - DNA, 25 bp, Saccharomyces pastorianus
cgccctgttgtttcacgattggatc

SEQ ID NO: 195382 - DNA, 25 bp, Saccharomyces pastorianus
gctaatcctgatgcgaaagctttta

SEQ ID NO: 195383 - DNA, 25 bp, Saccharomyces pastorianus
gtggccacctgttctaaagactgca

SEQ ID NO: 195384 - DNA, 25 bp, Saccharomyces pastorianus
cagcgcatctactgaacctgatcaa

SEQ ID NO: 195385 - DNA, 25 bp, Saccharomyces pastorianus
ttatatttgtttctcctcaggacac

SEQ ID NO: 195386 - DNA, 25 bp, Saccharomyces pastorianus
ggcgaaaccgaaattgtcaatcctg

SEQ ID NO: 195387 - DNA, 25 bp, Saccharomyces pastorianus
caaatatgttcacgtggccacctgt

SEQ ID NO: 195388 - DNA, 25 bp, Saccharomyces pastorianus
tgagcgcatctattggtggcgaaac

SEQ ID NO: 195389 - DNA, 25 bp, Saccharomyces pastorianus
ggagaaccctaaggtcgccctgttg

SEQ ID NO: 195390 - DNA, 25 bp, Saccharomyces pastorianus
ggatgcgctaacaggtaccagagga

SEQ ID NO: 195391 - DNA, 25 bp, Saccharomyces pastorianus
ggcgcaacaaatatcccatggcaac

SEQ ID NO: 195392 - DNA, 25 bp, Saccharomyces pastorianus
agaaaactaacaccatgctctccag

SEQ ID NO: 195393 - DNA, 25 bp, Saccharomyces pastorianus
ttggcggcaagaaccaccatgttcg

SEQ ID NO: 195394 - DNA, 25 bp, Saccharomyces pastorianus
aggtgttttggtccttggcgcaaca

SEQ ID NO: 195395 - DNA, 25 bp, Saccharomyces pastorianus
attccgggagtgatattgctgtagt

SEQ ID NO: 195396 - DNA, 25 bp, Saccharomyces pastorianus
atgctctccaggtgatgatggcgcc

SEQ ID NO: 195397 - DNA, 25 bp, Saccharomyces pastorianus
aatcgacgagacctaccgtgaatga

SEQ ID NO: 195398 - DNA, 25 bp, Saccharomyces pastorianus
ataccattaccagatttggcggcaa

SEQ ID NO: 195399 - DNA, 25 bp, Saccharomyces pastorianus
gacactccatgcgtattgaccaagg

SEQ ID NO: 195400 - DNA, 25 bp, Saccharomyces pastorianus
attcaaagcgcgacacatttcaaag

SEQ ID NO: 195401 - DNA, 25 bp, Saccharomyces pastorianus
agcagctgcactctacacaaaagga

SEQ ID NO: 195402 - DNA, 25 bp, Saccharomyces pastorianus
aattctcaggattgtgtgcctctac

SEQ ID NO: 195403 - DNA, 25 bp, Saccharomyces pastorianus
gagggctcaacaacacgcgtttgga

SEQ ID NO: 195404 - DNA, 25 bp, Saccharomyces pastorianus
aagtatcctaagcttcctcaaacga

SEQ ID NO: 195405 - DNA, 25 bp, Saccharomyces pastorianus
aatttaccaccttcgccagtaagag

SEQ ID NO: 195406 - DNA, 25 bp, Saccharomyces pastorianus
caaattggtggttgtgcctcgcgaa

SEQ ID NO: 195407 - DNA, 25 bp, Saccharomyces pastorianus
aagtgtcatctgttgcagtcggtgt

SEQ ID NO: 195408 - DNA, 25 bp, Saccharomyces pastorianus
gactcttgccaagatccaagcgttt

SEQ ID NO: 195409 - DNA, 25 bp, Saccharomyces pastorianus
agaaagcgttgtcccattgtctaaa

SEQ ID NO: 195410 - DNA, 25 bp, Saccharomyces pastorianus
ttcaagtccgattcacatgtcgcca

SEQ ID NO: 195411 - DNA, 25 bp, Saccharomyces pastorianus
aagatacctggagtctcgtcgagac

SEQ ID NO: 195412 - DNA, 25 bp, Saccharomyces pastorianus
gaaccagaccagttaccacaaaagg

SEQ ID NO: 195413 - DNA, 25 bp, Saccharomyces pastorianus
atccaattcctagtgcgtttaccaa

SEQ ID NO: 195414 - DNA, 25 bp, Saccharomyces pastorianus
tatggagtacgttccatcctcaaag

SEQ ID NO: 195415 - DNA, 25 bp, Saccharomyces pastorianus
tagaccagggtcatttatcgccatt

SEQ ID NO: 195416 - DNA, 25 bp, Saccharomyces pastorianus
gacaatggttctttgcgacactact

SEQ ID NO: 195417 - DNA, 25 bp, Saccharomyces pastorianus
gacaccgtttggaattcccattcaa

SEQ ID NO: 195418 - DNA, 25 bp, Saccharomyces pastorianus
actttgcccaataccatcgacaatg

SEQ ID NO: 195419 - DNA, 25 bp, Saccharomyces pastorianus
gcgacactacttctgcacaatttga

SEQ ID NO: 195420 - DNA, 25 bp, Saccharomyces pastorianus
gatttggaccacactttgacacttt

SEQ ID NO: 195421 - DNA, 25 bp, Saccharomyces pastorianus
ggacattaccgcaagatccaattcc

SEQ ID NO: 195422 - DNA, 25 bp, Saccharomyces pastorianus
ttatcgccatttcttgattccttgc

SEQ ID NO: 195423 - DNA, 25 bp, Saccharomyces pastorianus
ctgcccgatgtttgctatagttggt

SEQ ID NO: 195424 - DNA, 25 bp, Saccharomyces pastorianus
ggatgtcttccatacagtttttggt

SEQ ID NO: 195425 - DNA, 25 bp, Saccharomyces pastorianus
gtcttggcgctttggcaattgctaa

SEQ ID NO: 195426 - DNA, 25 bp, Saccharomyces pastorianus
gtttatacagccttgagtgcactat

SEQ ID NO: 195427 - DNA, 25 bp, Saccharomyces pastorianus
gaccctgctgtagactttgtactca

SEQ ID NO: 195428 - DNA, 25 bp, Saccharomyces pastorianus
tttagtccccatagatcccatatat

SEQ ID NO: 195429 - DNA, 25 bp, Saccharomyces pastorianus
tatgtcctaatgctgaatcccatgc

SEQ ID NO: 195430 - DNA, 25 bp, Saccharomyces pastorianus
acgtctgaagttgttgaccctgctg

SEQ ID NO: 195431 - DNA, 25 bp, Saccharomyces pastorianus
gaagatggttcgttccagggtgaca

SEQ ID NO: 195432 - DNA, 25 bp, Saccharomyces pastorianus
tgcagctcaagcttttacctgtctt

SEQ ID NO: 195433 - DNA, 25 bp, Saccharomyces pastorianus
ggtggtggctttgcgaacgacaatt

SEQ ID NO: 195434 - DNA, 25 bp, Saccharomyces pastorianus
ttgaaagcaatcgtctcacctcaag

SEQ ID NO: 195435 - DNA, 25 bp, Saccharomyces pastorianus
gtttcagtatatcagcggtgctttc

SEQ ID NO: 195436 - DNA, 25 bp, Saccharomyces pastorianus
ttcttccccatttatgttttccatg

SEQ ID NO: 195437 - DNA, 25 bp, Saccharomyces pastorianus
gtattcttctttgttgtacatcttc

SEQ ID NO: 195438 - DNA, 25 bp, Saccharomyces pastorianus
aaatttcagccaaccgtattcttct

SEQ ID NO: 195439 - DNA, 25 bp, Saccharomyces pastorianus
aatcgttcatgtggcaactgtttca

SEQ ID NO: 195440 - DNA, 25 bp, Saccharomyces pastorianus
agtgaagaagtcctcatcgtcctct

SEQ ID NO: 195441 - DNA, 25 bp, Saccharomyces pastorianus
gtatcttctccaggacagcttgtaa

SEQ ID NO: 195442 - DNA, 25 bp, Saccharomyces pastorianus
ggtgctttcattttgtgtagctcct

SEQ ID NO: 195443 - DNA, 25 bp, Saccharomyces pastorianus
gtgtagctcctttatgttgcaaatc

SEQ ID NO: 195444 - DNA, 25 bp, Saccharomyces pastorianus
cacctcaagatcttcttctggtatc

SEQ ID NO: 195445 - DNA, 25 bp, Saccharomyces pastorianus
ggaagtttagcaggccacactgata

SEQ ID NO: 195446 - DNA, 25 bp, Saccharomyces pastorianus
tttacaccgtagcttggtcaccaaa

SEQ ID NO: 195447 - DNA, 25 bp, Saccharomyces pastorianus
gaaacttgtctcttgtggctatgat

SEQ ID NO: 195448 - DNA, 25 bp, Saccharomyces pastorianus
aggtagtgcctctcatgatatgact

SEQ ID NO: 195449 - DNA, 25 bp, Saccharomyces pastorianus
gactcgctttcaatgctatgggata

SEQ ID NO: 195450 - DNA, 25 bp, Saccharomyces pastorianus
tattggcgcatcgtaacatcgttac

SEQ ID NO: 195451 - DNA, 25 bp, Saccharomyces pastorianus
gagactttgggatgcgtcaacacat

SEQ ID NO: 195452 - DNA, 25 bp, Saccharomyces pastorianus
ggtgatgacactcgcaggacactca

SEQ ID NO: 195453 - DNA, 25 bp, Saccharomyces pastorianus
tagtctgtcttttcaatgcgatgga

SEQ ID NO: 195454 - DNA, 25 bp, Saccharomyces pastorianus
gatctcttgtttgtagcggtggcat

SEQ ID NO: 195455 - DNA, 25 bp, Saccharomyces pastorianus
gacactcaaagcctatttacaccgt

SEQ ID NO: 195456 - DNA, 25 bp, Saccharomyces pastorianus
gaaaacttaaataggtcgcatgaac

SEQ ID NO: 195457 - DNA, 25 bp, Saccharomyces pastorianus
gatggcccaaggtgaaacattatca

SEQ ID NO: 195458 - DNA, 25 bp, Saccharomyces pastorianus
atatgaaaccgtattgcgaaccaat

SEQ ID NO: 195459 - DNA, 25 bp, Saccharomyces pastorianus
atcgaagacgatggacaacttggaa

SEQ ID NO: 195460 - DNA, 25 bp, Saccharomyces pastorianus
aaagagccgttgatgctataaggga

SEQ ID NO: 195461 - DNA, 25 bp, Saccharomyces pastorianus
agacgctttcgttaaaacagacaat

SEQ ID NO: 195462 - DNA, 25 bp, Saccharomyces pastorianus
ttagtgggacagttatcgaagacga

SEQ ID NO: 195463 - DNA, 25 bp, Saccharomyces pastorianus
acaattccacgagttcgtactcaaa

SEQ ID NO: 195464 - DNA, 25 bp, Saccharomyces pastorianus
gaaaagtctgaaatctctacaaaag

SEQ ID NO: 195465 - DNA, 25 bp, Saccharomyces pastorianus
tgaggaggagacacacaaacttaat

SEQ ID NO: 195466 - DNA, 25 bp, Saccharomyces pastorianus
gaagttttcccaaatcgaaacactg

SEQ ID NO: 195467 - DNA, 25 bp, Saccharomyces pastorianus
gagtcactagtatcttgccgttaac

SEQ ID NO: 195468 - DNA, 25 bp, Saccharomyces pastorianus
gctggttctaatggattgttcgctt

SEQ ID NO: 195469 - DNA, 25 bp, Saccharomyces pastorianus
gttaaccctgtccttattgcaatat

SEQ ID NO: 195470 - DNA, 25 bp, Saccharomyces pastorianus
agaactgctataggccactgaacga

SEQ ID NO: 195471 - DNA, 25 bp, Saccharomyces pastorianus
gggcaaggccataagctttgaacaa

SEQ ID NO: 195472 - DNA, 25 bp, Saccharomyces pastorianus
aaggtatcgagtttgctcctgtcgc

SEQ ID NO: 195473 - DNA, 25 bp, Saccharomyces pastorianus
gatgcggccgtatggtgtgaaaatc

SEQ ID NO: 195474 - DNA, 25 bp, Saccharomyces pastorianus
ctaggtaaaaggctatctccattaa

SEQ ID NO: 195475 - DNA, 25 bp, Saccharomyces pastorianus
gctgtagcgcaggatgtcattaaca

SEQ ID NO: 195476 - DNA, 25 bp, Saccharomyces pastorianus
ccgttggtcccatttcaagcaatag

SEQ ID NO: 195477 - DNA, 25 bp, Saccharomyces pastorianus
gcaaagtgtaagacctaccaccgtt

SEQ ID NO: 195478 - DNA, 25 bp, Saccharomyces pastorianus
tttctcactgtatcctcaatttacc

SEQ ID NO: 195479 - DNA, 25 bp, Saccharomyces pastorianus
aggttggctccaaatttctcactgt

SEQ ID NO: 195480 - DNA, 25 bp, Saccharomyces pastorianus
gtgtctttaacaattctccggatga

SEQ ID NO: 195481 - DNA, 25 bp, Saccharomyces pastorianus
tattagactctatctccgtcaaacc

SEQ ID NO: 195482 - DNA, 25 bp, Saccharomyces pastorianus
ggcgcgcggaggatctacaattgtc

SEQ ID NO: 195483 - DNA, 25 bp, Saccharomyces pastorianus
gaggacgatccacaaccggtattat

SEQ ID NO: 195484 - DNA, 25 bp, Saccharomyces pastorianus
gacgatccacagtacgcagatttca

SEQ ID NO: 195485 - DNA, 25 bp, Saccharomyces pastorianus
gttcccgctaccaagattcattgat

SEQ ID NO: 195486 - DNA, 25 bp, Saccharomyces pastorianus
taactatcaagacatggcgcgcgga

SEQ ID NO: 195487 - DNA, 25 bp, Saccharomyces pastorianus
gatcctcaatctttcaggttggctc

SEQ ID NO: 195488 - DNA, 25 bp, Saccharomyces pastorianus
gattcaaccaactctaacttctttc

SEQ ID NO: 195489 - DNA, 25 bp, Saccharomyces pastorianus
tgtaggcgtcaagcttaagttcaac

SEQ ID NO: 195490 - DNA, 25 bp, Saccharomyces pastorianus
ggacaactactttaacctgcagctg

SEQ ID NO: 195491 - DNA, 25 bp, Saccharomyces pastorianus
aagccgttcctcaaaggcctggtca

SEQ ID NO: 195492 - DNA, 25 bp, Saccharomyces pastorianus
tgcagccggtgaacccgaagccgtt

SEQ ID NO: 195493 - DNA, 25 bp, Saccharomyces pastorianus
tggtcaaccatcgtgtaggcgtcaa

SEQ ID NO: 195494 - DNA, 25 bp, Saccharomyces pastorianus
tgatatcagcgcgatgcagccggtg

SEQ ID NO: 195495 - DNA, 25 bp, Saccharomyces pastorianus
gcttaagttcaacagcaccgaatat

SEQ ID NO: 195496 - DNA, 25 bp, Saccharomyces pastorianus
actttaacctgcagctgaacgaagc

SEQ ID NO: 195497 - DNA, 25 bp, Saccharomyces pastorianus
aatatagaggtacgctcgtgtccac

SEQ ID NO: 195498 - DNA, 25 bp, Saccharomyces pastorianus
ggcaccctgggcgagatattcatcc

SEQ ID NO: 195499 - DNA, 25 bp, Saccharomyces pastorianus
tttgttgcgggtgtctcgcacggca

SEQ ID NO: 195500 - DNA, 25 bp, Saccharomyces pastorianus
gggacatcaactcgcaaggtttcaa

SEQ ID NO: 195501 - DNA, 25 bp, Saccharomyces pastorianus
agaccctagagtggcgatcggcgaa

SEQ ID NO: 195502 - DNA, 25 bp, Saccharomyces pastorianus
gaatgatggccagacctttgaccat

SEQ ID NO: 195503 - DNA, 25 bp, Saccharomyces pastorianus
agagaccgtgcccaagttgttcgag

SEQ ID NO: 195504 - DNA, 25 bp, Saccharomyces pastorianus
aggtttcaagattgccctcgagctt

SEQ ID NO: 195505 - DNA, 25 bp, Saccharomyces pastorianus
gttgttcgagtctttgcacgatcac

SEQ ID NO: 195506 - DNA, 25 bp, Saccharomyces pastorianus
agtgccattcactttcggcgtgaga

SEQ ID NO: 195507 - DNA, 25 bp, Saccharomyces pastorianus
agtttggcgccaataaccttatcct

SEQ ID NO: 195508 - DNA, 25 bp, Saccharomyces pastorianus
tgagcgggttcttcggtctacaaaa

SEQ ID NO: 195509 - DNA, 25 bp, Saccharomyces pastorianus
ccttttcattactttctggtccatt

SEQ ID NO: 195510 - DNA, 25 bp, Saccharomyces pastorianus
caaatgaacgtggtctatcctccgc

SEQ ID NO: 195511 - DNA, 25 bp, Saccharomyces pastorianus
gcgattacaattaccgtccgtacta

SEQ ID NO: 195512 - DNA, 25 bp, Saccharomyces pastorianus
gattcggatgattttgccacctcaa

SEQ ID NO: 195513 - DNA, 25 bp, Saccharomyces pastorianus
cctggagttctgcttgtttgttaga

SEQ ID NO: 195514 - DNA, 25 bp, Saccharomyces pastorianus
gaaaccatcctcttatttgtatcaa

SEQ ID NO: 195515 - DNA, 25 bp, Saccharomyces pastorianus
gtgggtctggctttacggctacttt

SEQ ID NO: 195516 - DNA, 25 bp, Saccharomyces pastorianus
agaaactatcaccaaggccctgagt

SEQ ID NO: 195517 - DNA, 25 bp, Saccharomyces pastorianus
aagagcgttccatcatttccacttt

SEQ ID NO: 195518 - DNA, 25 bp, Saccharomyces pastorianus
gtatgcgtactttagacccaagcga

SEQ ID NO: 195519 - DNA, 25 bp, Saccharomyces pastorianus
ttatttgtgcctgagcatgccataa

SEQ ID NO: 195520 - DNA, 25 bp, Saccharomyces pastorianus
agtatgcaatgactcaagccccacg

SEQ ID NO: 195521 - DNA, 25 bp, Saccharomyces pastorianus
aaaccagtccacgttgtcagaatgc

SEQ ID NO: 195522 - DNA, 25 bp, Saccharomyces pastorianus
aggcgccaatgcaagccatttgatt

SEQ ID NO: 195523 - DNA, 25 bp, Saccharomyces pastorianus
gagtacttcatatcaccacgacaac

SEQ ID NO: 195524 - DNA, 25 bp, Saccharomyces pastorianus
gatacctatcagacaaccataccat

SEQ ID NO: 195525 - DNA, 25 bp, Saccharomyces pastorianus
aagcagggtatgtcaggcttacctc

SEQ ID NO: 195526 - DNA, 25 bp, Saccharomyces pastorianus
gagaatgaccgtttgctcaaccaaa

SEQ ID NO: 195527 - DNA, 25 bp, Saccharomyces pastorianus
ataccattactctcaaccaactact

SEQ ID NO: 195528 - DNA, 25 bp, Saccharomyces pastorianus
cgagaatgtctcaaggcgccaatgc

SEQ ID NO: 195529 - DNA, 25 bp, Saccharomyces pastorianus
gggaattcatctactagtgccttga

SEQ ID NO: 195530 - DNA, 25 bp, Saccharomyces pastorianus
attgccttcaatatccccttcgatg

SEQ ID NO: 195531 - DNA, 25 bp, Saccharomyces pastorianus
gccctttcaagctcaggcgaaattt

SEQ ID NO: 195532 - DNA, 25 bp, Saccharomyces pastorianus
caggcttacctcctatttttggtgg

SEQ ID NO: 195533 - DNA, 25 bp, Saccharomyces pastorianus
gaaaacatgatcttctcacgcatta

SEQ ID NO: 195534 - DNA, 25 bp, Saccharomyces pastorianus
gattattcatgacgactcactagta

SEQ ID NO: 195535 - DNA, 25 bp, Saccharomyces pastorianus
atgtcctgatatgtctttttctaga

SEQ ID NO: 195536 - DNA, 25 bp, Saccharomyces pastorianus
aaaacgctagtggaccagaaccata

SEQ ID NO: 195537 - DNA, 25 bp, Saccharomyces pastorianus
aacttgtccaagaccacggagttca

SEQ ID NO: 195538 - DNA, 25 bp, Saccharomyces pastorianus
atgtcctatttgtagcaaaccatgt

SEQ ID NO: 195539 - DNA, 25 bp, Saccharomyces pastorianus
tctcacgcattatgggtctattcat

SEQ ID NO: 195540 - DNA, 25 bp, Saccharomyces pastorianus
acttgagtctggtgaaaatgggcta

SEQ ID NO: 195541 - DNA, 25 bp, Saccharomyces pastorianus
ggaagtgtcatatatgtcctgatat

SEQ ID NO: 195542 - DNA, 25 bp, Saccharomyces pastorianus
ggaatagcaaacactcgaatgagca

SEQ ID NO: 195543 - DNA, 25 bp, Saccharomyces pastorianus
ggaagaagatatcccactggaacta

SEQ ID NO: 195544 - DNA, 25 bp, Saccharomyces pastorianus
gatggtgaaacaaccgatgccaacg

SEQ ID NO: 195545 - DNA, 25 bp, Saccharomyces pastorianus
catcgttactggtggtaatggccca

SEQ ID NO: 195546 - DNA, 25 bp, Saccharomyces pastorianus
gaatgcgccagtttttgtagattta

SEQ ID NO: 195547 - DNA, 25 bp, Saccharomyces pastorianus
cgaggaggcgtatgtgcattcatat

SEQ ID NO: 195548 - DNA, 25 bp, Saccharomyces pastorianus
ttaccagatggttcctttgaggact

SEQ ID NO: 195549 - DNA, 25 bp, Saccharomyces pastorianus
agagcatttttctgatgaggagact

SEQ ID NO: 195550 - DNA, 25 bp, Saccharomyces pastorianus
aaggccatcccaaaagaccaaagag

SEQ ID NO: 195551 - DNA, 25 bp, Saccharomyces pastorianus
aatggcccagaagattttcaacagc

SEQ ID NO: 195552 - DNA, 25 bp, Saccharomyces pastorianus
aagagcaactactccatacatgacc

SEQ ID NO: 195553 - DNA, 25 bp, Saccharomyces pastorianus
gatgccaacggtaagaccatcgtta

SEQ ID NO: 195554 - DNA, 25 bp, Saccharomyces pastorianus
gagaaattgcgtgctttagttttaa

SEQ ID NO: 195555 - DNA, 25 bp, Saccharomyces pastorianus
aagatgctttccaaatgctggatga

SEQ ID NO: 195556 - DNA, 25 bp, Saccharomyces pastorianus
aaatggtacctgacaatgacaccag

SEQ ID NO: 195557 - DNA, 25 bp, Saccharomyces pastorianus
aatgacaccagtaccgcggaagttg

SEQ ID NO: 195558 - DNA, 25 bp, Saccharomyces pastorianus
tgaatcgctaacgtttaaccaactt

SEQ ID NO: 195559 - DNA, 25 bp, Saccharomyces pastorianus
cacgatttaaacgttcccttgaatg

SEQ ID NO: 195560 - DNA, 25 bp, Saccharomyces pastorianus
cgcagtttcccgagcgtgaagaatt

SEQ ID NO: 195561 - DNA, 25 bp, Saccharomyces pastorianus
aagaacttatcgcagtttcccgagc

SEQ ID NO: 195562 - DNA, 25 bp, Saccharomyces pastorianus
aaccaacttacgcaggactacataa

SEQ ID NO: 195563 - DNA, 25 bp, Saccharomyces pastorianus
gaagaaggtgtaagctttcccatat

SEQ ID NO: 195564 - DNA, 25 bp, Saccharomyces pastorianus
aagccattggaagaggacacgattt

SEQ ID NO: 195565 - DNA, 25 bp, Saccharomyces pastorianus
agctttcccatattcttatctatca

SEQ ID NO: 195566 - DNA, 25 bp, Saccharomyces pastorianus
aagcggcgcagacttgttagtaaca

SEQ ID NO: 195567 - DNA, 25 bp, Saccharomyces pastorianus
gaggtatgtttttgtgcccttggaa

SEQ ID NO: 195568 - DNA, 25 bp, Saccharomyces pastorianus
acgactttgatcagactttgaacca

SEQ ID NO: 195569 - DNA, 25 bp, Saccharomyces pastorianus
ggattctaagcacctagttgtttta

SEQ ID NO: 195570 - DNA, 25 bp, Saccharomyces pastorianus
agataagcacaaagacgcaccatat

SEQ ID NO: 195571 - DNA, 25 bp, Saccharomyces pastorianus
gcaaaggagtgcgtactttttccct

SEQ ID NO: 195572 - DNA, 25 bp, Saccharomyces pastorianus
ggaaattgctttacaggaactaaca

SEQ ID NO: 195573 - DNA, 25 bp, Saccharomyces pastorianus
caattccaagaactgctaagcattt

SEQ ID NO: 195574 - DNA, 25 bp, Saccharomyces pastorianus
gaaagctttgccattatccaaacaa

SEQ ID NO: 195575 - DNA, 25 bp, Saccharomyces pastorianus
taacagaatatatagccacaagcgg

SEQ ID NO: 195576 - DNA, 25 bp, Saccharomyces pastorianus
aaatatccaatcacatttgcttagg

SEQ ID NO: 195577 - DNA, 25 bp, Saccharomyces pastorianus
atgttatcgcgtctacgttgggacc

SEQ ID NO: 195578 - DNA, 25 bp, Saccharomyces pastorianus
agcatcatcaaatttcccctttttg

SEQ ID NO: 195579 - DNA, 25 bp, Saccharomyces pastorianus
accaggtgtttactatgttccatat

SEQ ID NO: 195580 - DNA, 25 bp, Saccharomyces pastorianus
taaatgttttcgctcgtttatcgag

SEQ ID NO: 195581 - DNA, 25 bp, Saccharomyces pastorianus
gatcctcactcagcttctttgataa

SEQ ID NO: 195582 - DNA, 25 bp, Saccharomyces pastorianus
aaacgcattcctataatttcatgag

SEQ ID NO: 195583 - DNA, 25 bp, Saccharomyces pastorianus
gatagatcagcatcaagggcagttt

SEQ ID NO: 195584 - DNA, 25 bp, Saccharomyces pastorianus
gaacgaactactattaccaagcgaa

SEQ ID NO: 195585 - DNA, 25 bp, Saccharomyces pastorianus
gttccaagaacagccgatagatcag

SEQ ID NO: 195586 - DNA, 25 bp, Saccharomyces pastorianus
cagcaatgcgtttaagccgttgtat

SEQ ID NO: 195587 - DNA, 25 bp, Saccharomyces pastorianus
ttgggaccctcagcaatgcgtttaa

SEQ ID NO: 195588 - DNA, 1799 bp, Saccharomyces cerevisiae
atctggttgatcctgccagtagtcatatgcttgtctcaaagattaagccatgcatgtctaagtataagcaatttatacagtgaaactgcgaatggctcattaaatcagttatcgtttatttgatagttcctttactacatggtataactgtggtaattctagagctaatacatgcttaaaatctcgaccctttggaagagatgtatttattagataaaaaatcaatgtcttcggactctttgatgattcataataacttttcgaatcgcatggccttgtgctggcgatggttcattcaaatttctgccctatcaactttcgatggtaggatagtggcctaccatggtttcaacgggtaacggggaataagggttcgattccggagagggagcctgagaaacggctaccacatccaaggaaggcagcaggcgcgcaaattacccaatcctaattcagggaggtagtgacaataaataacgatacagggcccattcgggtcttgtaattggaatgagtacaatgtaaataccttaacgaggaacaattggagggcaagtctggtgccagcagccgcggtaattccagctccaatagcgtatattaaagttgttgcagttaaaaagctcgtagttgaactttgggcccggttggccggtccgattttttcgtgtactggatttccaacggggcctttccttctggctaaccttgagtccttgtggctcttggcgaaccaggacttttactttgaaaaaattagagtgttcaaagcaggcgtattgctcgaatatattagcatggaataatagaataggacgtttggttctattttgttggtttctaggaccatcgtaatgattaatagggacggtcgggggcatcagtattcaattgtcagaggtgaaattcttggatttattgaagactaactactgcgaaagcatttgccaaggacgttttcattaatcaagaacgaaagttaggggatcgaagatgatcagataccgtcgtagtcttaaccataaactatgccgactagggatcgggtggtgtttttttaatgacccactcggcaccttacgagaaatcaaagtctttgggttctggggggagtatggtcgcaaggctgaaacttaaaggaattgacggaagggcaccaccaggagtggagcctgcggcttaatttgactcaacacggggaaactcaccaggtccagacacaataaggattgacagattgagagctctttcttgattttgtgggtggtggtgcatggccgttcttagttggtggagtgatttgtctgcttaattgcgataacgaacgagaccttaacctactaaatagtggtgctagcatttgctggttatccacttcttagagggactatcggtttcaagccgatggaagtttgaggcaataacaggtctgtgatgcccttagacgttctgggccgcacgcgcgctacactgacggagccagcgagtctaaccttggccgagaggtcttggtaatcttgtgaaactccgtcgtgctggggatagagcattgtaattattgctcttcaacgaggaattcctagtaagcgcaagtcatcagcttgcgttgattacgtccctgccctttgtacacaccgcccgtcgctagtaccgattgaatggcttagtgaggcctcaggatctgcttagagaagggggcaactccatctcagagcggagaatttggacaaacttggtcatttagaggaactaaaagtcgtaacaaggtttccgtaggtgaacctgcggaaggatcatta

SEQ ID NO: 195589 - DNA, 1799 bp, Saccharomyces cerevisiae; identical to SEQ ID NO: 195588

SEQ ID NO: 195590 - DNA, 1799 bp, Saccharomyces cerevisiae; identical to SEQ ID NO: 195588

SEQ ID NO: 195591 - DNA, 1799 bp, Saccharomyces cerevisiae; identical to SEQ ID NO: 195588

SEQ ID NO: 195592 - DNA, 1799 bp, Saccharomyces cerevisiae; identical to SEQ ID NO: 195588

SEQ ID NO: 195593 - DNA, 3394 bp, Saccharomyces cerevisiae
tttgacctcaaatcaggtaggagtacccgctgaacttaagcatatcaataagcggaggaaaagaaaccaaccgggattgccttagtaacggcgagtgaagcggcaaaagctcaaatttgaaatctggtaccttcggtgcccgagttgtaatttggagagggcaactttggggccgttccttgtctatgttccttggaacaggacgtcatagagggtgagaatcccgtgtggcgaggagtgcggttctttgtaaagtgccttcgaagagtcgagttgtttgggaatgcagctctaagtgggtggtaaattccatctaaagctaaatattggcgagagaccgatagcgaacaagtacagtgatggaaagatgaaaagaactttgaaaagagagtgaaaaagtacgtgaaattgttgaaagggaagggcatttgatcagacatggtgttttgtgccctctgctccttgtgggtaggggaatctcgcatttcactgggccagcatcagttttggtggcaggataaatccataggaatgtagcttgcctcggtaagtattatagcctgtgggaatactgccagctgggactgaggactgcgacgtaagtcaaggatgctggcataatggttatatgccgcccgtcttgaaacacggaccaaggagtctaacgtctatgcgagtgtttgggtgtaaaacccatacgcgtaatgaaagtgaacgtaggttggggcctcgcaagaggtgcacaatcgaccgatcctgatgtcttcggatggatttgagtaagagcatagctgttgggacccgaaagatggtgaactatgcctgaatagggtgaagccagaggaaactctggtggaggctcgtagcggttctgacgtgcaaatcgatcgtcgaatttgggtataggggcgaaagactaatcgaaccatctagtagctggttcctgccgaagtttccctcaggatagcagaagctcgtatcagttttatgaggtaaagcgaatgattagaggttccggggtcgaaatgaccttgacctattctcaaactttaaatatgtaagaagtccttgttacttaattgaacgtggacatttgaatgaagagcttttagtgggccatttttggtaagcagaactggcgatgcgggatgaaccgaacgtagagttaaggtgccggaatacacgctcatcagacaccacaaaaggtgttagttcatctagacagccggacggtggccatggaagtcggaatccgctaaggagtgtgtaacaactcaccggccgaatgaactagccctgaaaatggatggcgctcaagcgtgttacctatactctaccgtcagggttgatatgatgccctgacgagtaggcaggcgtggaggtcagtgacgaagcctagaccgtaaggtcgggtcgaacggcctctagtgcagatcttggtggtagtagcaaatattcaaatgagaactttgaagactgaagtggggaaaggttccacgtcaacagcagttggacgtgggttagtcgatcctaagagatggggaagctccgtttcaaaggcctgattttatgcaggccaccatcgaaagggaatccggttaagattccggaacctggatatggattcttcacggtaacgtaactgaatgtggagacgtcggcgcgagccctgggaggagttatcttttcttcttaacagcttatcaccccggaattggtttatccggagatggggtcttatggctggaagaggccagcacctttgctggctccggtgcgcttgtgacggcccgtgaaaatccacaggaaggaatagttttcatgccaggtcgtactgataaccgcagcaggtctccaaggtgaacagcctctagttgatagaataatgtagataagggaagtcggcaaaatagatccgtaacttcgggataaggattggctctaagggtcgggtagtgagggccttggtcagacgcagcgggcgtgcttgtggactgcttggtggggcttgctctgctaggcggactacttgcgtgccttgttgtagacggccttggtaggtctcttgtagaccgtcgcttgctacaattaacgatcaacttagaactggtacggacaaggggaatctgactgtctaattaaaacatagcattgcgatggtcagaaagtgatgttgacgcaatgtgatttctgcccagtgctctgaatgtcaaagtgaagaaattcaaccaagcgcgggtaaacggcgggagtaactatgactctcttaaggtagccaaatgcctcgtcatctaattagtgacgcgcatgaatggattaacgagattcccactgtccctatctactatctagcgaaaccacagccaagggaacgggcttggcagaatcagcggggaaagaagaccctgttgagcttgactctagtttgacattgtgaagagacatagagggtgtagaataagtgggagcttcggcgccagtgaaataccactacctttatagtttctttacttattcaatgaagcggagctggaattcattttccacgttctagcattcaaggtcccattcggggctgatccgggttgaagacattgtcaggtggggagtttggctggggcggcacatctgttaaacgataacgcagatgtcctaaggggggctcatggagaacagaaatctccagtagaacaaaagggtaaaagcccccttgattttgattttcagtgtgaatacaaaccatgaaagtgtggcctatcgatcctttagtccctcggaatttgaggctagaggtgccagaaaagttaccacagggataactggcttgtggcagtcaagcgttcatagcgacattgctttttgattcttcgatgtcggctcttcctatcataccgaagcagaattcggtaagcgttggattgttcacccactaatagggaacgtgagctgggtttagaccgtcgtgagacaggttagttttaccctactgatgaatgttaccgcaatagtaattgaacttagtacgagaggaacagttcattcggataattggtttttgcggctgtctgatcaggcattgccgcgaagctaccatccgctggattatggctgaacgcctctaagtcagaatccatgctagaacgcggtgatttctttgctccacacaatatagatggatacgaataaggcgtccttgtggcgtcgctgaaccatagcaggctagcaacggtgcacttggcggaaaggccttgggtgcttgctggcgaattgcaatgtcattttgcgtggggataaatcatttgtatacgacttagatgtacaacggggtattgtaagcagtagagtagccttgttgttacgatctgctgagattaagcctttgttgtctgatttg

SEQ ID NO: 195594 - DNA, 3394 bp, Saccharomyces cerevisiae; identical to SEQ ID NO: 195593

SEQ ID NO: 195595 - DNA, 3394 bp, Saccharomyces cerevisiae; identical to SEQ ID NO: 195593

SEQ ID NO: 195596 - DNA, 3394 bp, Saccharomyces cerevisiae; identical to SEQ ID NO: 195593

SEQ ID NO: 195597 - DNA, 3394 bp, Saccharomyces cerevisiae; identical to SEQ ID NO: 195593

SEQ ID NO: 195598 - DNA, 1049 bp, Escherichia coli
atggctcaccgcccacgctggacattgtcgcaagtcacagaattatttgaaaaaccgttgctggatctgctgtttgaagcgcagcaggtgcatcgccagcatttcgatcctcgtcaggtgcaggtcagcacgttgctgtcgattaagaccggagcttgtccggaagattgcaaatactgcccgcaaacgtcgcgctacaaaaccgggctggaagccgagcggttgatggaagttgaacaggtgctggagtcggcgcgcaaagcgaaagcggcaggatcgacgcgcttctgtatgggcgcggcgtggaagaatccccacgaacgcgatatgccgtacctggaacaaatggtgcagggggtaaaagcgatggggctggaggcgtgtatgacgctgggcacgttgagtgaatctcaggcgcagcgcctcgcgaacgccgggctggattactacaaccacaacctggacacctcgccggagttttacggcaatatcatcaccacacgcacttatcaggaacgcctcgatacgctggaaaaagtgcgcgatgccgggatcaaagtctgttctggcggcattgtgggcttaggcgaaacggtaaaagatcgcgccggattattgctgcaactggcaaacctgccgacgccgccggaaagcgtgccaatcaacatgctggtgaaggtgaaaggcacgccgcttgccgataacgatgatgtcgatgcctttgattttattcgcaccattgcggtcgcgcggatcatgatgccaacctcttacgtgcgcctttctgccggacgcgagcagatgaacgaacagactcaggcgatgtgctttatggcaggcgcaaactcgattttctacggttgcaaactgctgaccacgccgaatccggaagaagataaagacctgcaactgttccgcaaactggggctaaatccgcagcaaactgccgtgctggcaggggataacgaacaacagcaacgtcttgaacaggcgctgatgaccccggacaccgacgaatattacaacgcggcagcattatgagctggcag

SEQ ID NO: 195599 - DNA, 1049 bp, Escherichia coli; identical to SEQ ID NO: 195598

SEQ ID NO: 195600 - DNA, 1049 bp, Escherichia coli; identical to SEQ ID NO: 195598

SEQ ID NO: 195601 - DNA, 748 bp, Escherichia coli
atggcaacggttaataaacaagccattgcagcggcatttggtcgggcagccgcacactatgagcaacatgcagatctacagcgccagagtgctgacgccttactggcaatgcttccacagcgtaaatacacccacgtactggacgcgggttgtggacctggctggatgagccgccactggcgggaacgtcacgcgcaggtgacggccttagatctctcgccgccaatgcttgttcaggcacgccagaaggatgccgcagaccattatctggcgggagatatcgaatccctgccgttagcgactgcgacgttcgatcttgcatggagcaatctcgcagtgcagtggtgcggtaatttatccacggcactccgcgagctgtatcgggtggtgcgccccaaaggcgtggtcgcgtttaccacgctggtgcagggatcgttacccgaacgtcatcaggcgtggcaggcggtggacgagcgtccgcatgctaatcgctttttaccgccagatgaaatcgaacagtcgctgaacggcgtgcattatcaacatcatattcagcccatcacgctgtggtttgatgatgcgctcagtgccatgcgttcgctgaaaggcatcggtgccacgcatcttcatgaagggcgcgacccgcgaatattaacgcgttcgcagttgcagcgattgcaactggcctggccgcaacagcaggggcgatatcctctgacgtatcatctttttttgggagtgattgctc

SEQ ID NO: 195602 - DNA, 748 bp, Escherichia coli; identical to SEQ ID NO: 195601

SEQ ID NO: 195603 - DNA, 652 bp, Escherichia coli
aaacgttattttgtcaccggaacggataccgaagtggggaaaactgtcgccagttgtgcacttttacaagccgcaaaggcagcaggctaccggacggcaggttataaaccggtcgcctctggcagcgaaaagaccccggaaggtttacgcaatagcgacgcgctggcgttacagcgcaacagcagcctgcagctggattacgcaacagtaaatccttacaccttcgcagaacccacttcgccgcacatcatcagcgcgcaagagggcagaccgatagaatcattggtaatgagcgccggattacgcgcgcttgaacaacaggctgactgggtgttagtggaaggtgctggcggctggtttacgccgctttctgacactttcacttttgcagattgggtaacacaggaacaactgccggtgatactggtagttggtgtgaaactcggctgtattaatcacgcgatgttgactgcacaggtaatacaacacgccggactgactctggcgggttgggtggcgaacgatgttacgcctccgggaaaacgtcacgctgaatatatgaccacgctcacccgcatgattcccgcgccgctgctgggagagatcccctggcttgcagaaaatccagaaaatgcggcaaccggaaagtaca

SEQ ID NO: 195604 - DNA, 652 bp, Escherichia coli; identical to SEQ ID NO: 195603

SEQ ID NO: 195605 - DNA, 1032 bp, Bacteriophage P1
atgtccaatttactgaccgtacaccaaaatttgcctgcattaccggtcgatgcaacgagtgatgaggttcgcaagaacctgatggacatgttcagggatcgccaggcgttttctgagcatacctggaaaatgcttctgtccgtttgccggtcgtgggcggcatggtgcaagttgaataaccggaaatggtttcccgcagaacctgaagatgttcgcgattatcttctatatcttcaggcgcgcggtctggcagtaaaaactatccagcaacatttgggccagctaaacatgcttcatcgtcggtccgggctgccacgaccaagtgacagcaatgctgtttcactggttatgcggcggatccgaaaagaaaacgttgatgccggtgaacgtgcaaaacaggctctagcgttcgaacgcactgatttcgaccaggttcgttcactcatggaaaatagcgatcgctgccaggatatacgtaatctggcatttctggggattgcttataacaccctgttacgtatagccgaaattgccaggatcagggttaaagatatctcacgtactgacggtgggagaatgttaatccatattggcagaacgaaaacgctggttagcaccgcaggtgtagagaaggcacttagcctgggggtaactaaactggtcgagcgatggatttccgtctctggtgtagctgatgatccgaataactacctgttttgccgggtcagaaaaaatggtgttgccgcgccatctgccaccagccagctatcaactcgcgccctggaagggatttttgaagcaactcatcgattgatttacggcgctaaggatgactctggtcagagatacctggcctggtctggacacagtgcccgtgtcggagccgcgcgagatatggcccgcgctggagtttcaataccggagatcatgcaagctggtggctggaccaatgtaaatattgtcatgaactatatccgtaacctggatagtgaaacaggggcaatggtgcgcctgctggaagatggcgattag

SEQ ID NO: 195606 - DNA, 1032 bp, Bacteriophage P1; identical to SEQ ID NO: 195605

SEQ ID NO: 195607 - DNA, 6540 bp, Bacillus subtilis
gggactaccctaaataaggatgaggggcggcggtcagccgccttttttctattacatgtcagcgcggaagcggatttttattttcatcaagcgtaaatccttctccgagcacatcgtgaacatcgcttaccgctacaaaggcatggggatcaatggagttaatcacgcttttcagcatcaccaattcatttttcggcaccacacaataaagtacatctatatcctcttttgtgtaggaaccttgtcctttcaaaatggtgacgccccgttccatttcttcaagaatctttttctgaatcaggtcgtttttcgaagagatgatcgtagcgcctttagcagcgtatccgccttcctgaataaaatcgattaatcttgccgctacaaatacagctaccagcgtatacatcgcttctttataggagagataagtaagcaaagacaaaatgatgacgcaggcatcgaaagcaaacatcgttctgcccatcggaatcccaaaatacttattcactaaacgtgcgatgatatcaacaccgcctgtcgtaccgccgaacttaaaaataatacccagtccggctccgatgaatacgccggcaaataaagcggcgagcgctaagtcgtgctgaaggggcatatggatttcatatcgctgaaagatgctgaggaacaaagacaaggctacagtgccgacaagggtataaacaaacattgtcctgccgagcatgtggaaaagggcataaagcaaaagtgtaatacctgtaaaaccgccctcagccagattgttctgcatattgaaatgaaccaagccaaatgaaaaaattgccgctccgattaaaataaaaaatatgttttttaatctaatttctccaagcatcacacaaaaccccttttccttccattagatagcgtttatattatagtggatgaaaaagaaaacagcaaacgtgcttaaacatttgtcaaacgtatctgaattagctaacatgtaagaggatgataggaggtttcgttcagtgagtgataaaacaatgaaagacatacaggctgaagtagaccgttacataggccaatttaaagaaggatattttagcccgctggccatgatggcgaggctgactgaagaactgggcgagcttgccagagaagtgaatcaccgttatggagaaaaaccaaaaaaagcgactgaagatgataaaagcatggaagaggaaataggcgatgtgctatttgtattggtttgtttagccaactctcttgatatctctttagaggaagctcacgaccgagtcatgcataaatttaatacaagagataaagatcgctggaccagaaaagaagaaggaaagtagaggagatcaagatgtcaaacgaaacaattaaattagtcattgcgggaccgcgtggaagaatggggcaggaagctgttaaattggcagaacgaacaccacattttgaccttgtaggggccatagaccatacatacgatcagcaaaaattatctgatgtgatgcctgttgagtcagatgctttcatttacacagatatccatgcctgttttacagaaacacaaccggatgtcttgattgatttaacaacgcccgaaatcggaaaagtacatacaaaaattgcattagagcacggagtccgtccagttgtcggaacaaccggtttctcagaagctgatttaaaagagctcacatctttaacagaagaaaaagggatcggagccatcatcgcgccaaattttgcgctcggtgcgatactgatgatgaaattttcaaaaatggctgccaactattttgaggatgttgagattattgagcttcatcatgaccagaagcttgacgcaccaagcggaactgcgcttaaaacagcggaaatgatttcagaagtccgtaaagaaaagcagcaaggacatccggatgaaaaagaaattctcccaggagcaagaggagcggagcaaaacggtattcgcttgcacaggcttcagatacgccatgattcttataaccgtgcttctttcatgtcaggcgttaaactgtcagtcgaacaagtcatgaagattgatcagcttgtgtatggtttagaaaatatcattgattagacggggggataaacaatgaaaattgctttgatcgcgcatgacaagaaaaaacaggatatggttcaatttacgactgcctatcgggatattttaaagaatcatgatctatacgcaaccggaaccacagggttgaaaattcatgaggcgacaggtcttcaaattgaacgttttcaatccggccctttagggggagaccagcaaatcggtgcactgatcgctgccaatgcactcgatcttgtcatttttttgcgcgacccgctgaccgcgcagccgcatgaaccggatgtctcggcattaatccgtttatgtgatgtgtattccattccgctcgccacaaatatgggtactgcggaaattcttgtgcgcacacttgatgaaggtgttttcgaattccgtgaccttcttcggggagaagagccgaatgtataatgctgacgttcttgcttttggcgcccacagtgatgatgtcgagatcggaatgggcggcacaatagcgaagtttgtcaaacaggaaaaaaaagtaatgatatgcgatttgacagaagcggaactctcttctaacggtacggtcagtttgcgtaaagaagaagcagctgaagcagcccgcatattaggcgcagataaaagaattcagctaacgcttccagaccgcggcctaataatgagtgatcaggcaattcggtcaattgtcactgtcatcagaatctgtcggccaaaagcggtttttatgccgtataaaaaggatcgccatccggatcacggcaatgcggctgcactggtggaagaagcgatcttttccgccggaatccataaatataaagacgaaaaaagccttccggcgcataaagtcagcaaggtttactattatatgataaatggttttcatcagccggattttgttattgatatctcggatacaatagaggcaaagaaacaaagcctcaacgcctacaaaagccagtttatcccgtcaaaggattccgtttctactcctctgacgaatgggtatattgaaatcgttgaagcgagagaaaagctttacggtaaagaagcgggcgtggagtatgccgaagtttcttttccaaacggatgctgatgcttgatcatgatgtgcttgggggcgaacaatgagaaaactagggaagcagcttgctgaaaagggacatgaaatccatttcatcacatcaagcattccgtttagactgaatacatatcatcccaatattcattttcatgaagttgaggttaatcaatatgctgtttttaagtatcctccgtatgatttgacattggcaagcaaaatcgctgaggtggcggaacgggagaatttagacattatccatgctcactatgctctcccgcatgccgtttgcgcctatcttgcaaaacaaatgctgaaacgcaatatcggcattgttaccactttgcatggcacggatatcacggtgttaggttatgatccgtctctaaaagatctgatccgttttgctattgagtcatcagacagggtgacggccgtctcctcagcgcttgcggctgaaacatacgatttaattaaaccggagaaaaaaattgaaacgatttataactttatagacgagcgcgtgtatctgaagaaaaacacagcggcaattaaagagaaacatggaattttaccagatgaaaaagtcgtcatccatgtgtccaacttcagaaaagttaaacgcgtgcaggatgtcatccgtgtgttccgcaatatcgctggcaaaacgaaagcgaagctgcttttagtcggagacggtccggagaaatcgacagcctgcgagcttatcagaaaatatggcttggaagaccaagtcttaatgcttggaaatcaagaccgtgttgaagatctttattctattagcgatttgaagctgctgctatctgaaaaagaaagctttggccttgtcctgcttgaagcgatggcttgcggagtgccttgtattggaacaaacattggcggtatccctgaggttataaaaaacaatgtgagcggatttttggtggatgtcggtgatgttacggccgcaacagcccgcgcgatgagcattttagaagatgaacagctaagcaatcgttttacaaaggcggcaatagagatgcttgaaaatgaattttcttctaaaaaaattgtcagccagtatgaacagatttatgccgatttagcagaaccggagtgatcacatggaaaaagtttttatcaaagcacttcccgtgctccgcatcttaatcgaagcgggccatcaggcttattttgtcgggggcgcagttcgtgacagctatatgaaacgaacgatcggagatgtcgatatcgcgacagatgcggcacctgatcaagtagaacggctgtttcagcggactgttgatgtaggcaaagatgaatctgattatgttgatttcagaagaccgtcagaagtgcaatttatctcatcattagaagaggatctaaaacgcagagatttaacgatcaatgcgatggccatgacagcggacgggaaggtgcttgattattttggcggcaagaaagatattgatcagaaagtgattcgaaccgttggaaagcctgaggatagatttcaagaggatgcgcttcgtatgctgagagccgtacgctttatgagccagcttggctttacgctttcaccggaaacagaagaagccattgcgaaagaaaaatcactcctctcccatgtttcagtcgaacgaaaaactatagagtttgagaaattgctgcagggaagagcttctcgccaggcgcttcaaacactcattcaaacgagattgtatgaagagcttcctggtttttatcataaacgagaaaacctgatttcaacgagtgagtttccattcttctctttaacatcccgtgaggagctttgggctgctcttttaattaaccttggcatagttttgaaagacgcgccccttttcctgaaagcctggaagctcccgggaaaagtgatcaaggaagccattcacattgccgatacgtttggccagagccttgacgcaatgacaatgtacagagctgggaaaaaagcactgctctcagcggccaaaatatcgcagcttcggcaaaacgaaaaactggatgaaaagaaactgaaggacattcagtacgcttatcaaaacctgccgatcaaaagccttaaggatcttgatatcacgggtaaggacttgcttgcgcttcgaaaccggccggccggaaaatgggtgtcagaagaattacagtggatcgagcaggctgttgtgacagggaagctctccaatcaaaagaaacacatagaggagtggctgaagacatgcggtcaacattaagaaaagaccttattgaattattttctcaggccggcaatgaatttatttccggccaaaaaatcagtgatgctctcggctgttcaagaactgctgtgtggaagcatattgaagagcttcggaaagagggttatgaagtagaagccgttagaagaaaaggatatcggctcatcaaaaaacccggaaaactcagtgaaagcgaaattcgttttggattaaaaacggaagtgatgggccagcatcttatttaccatgacgttctttcaagcacgcaaaaaacggctcatgagctcgcgaataataacgcaccggaaggcacccttgaaggaaacggtgtttggatgagcctgattttgcggcctgacattccgctccaaaaaacaccgcagctgactctgcttgctgcagtagctgttgtgcagggaatagaagaggcagcaggcatccaaacggatattaaatggccaaatgatattttgattaacggaaaaaaaacagtcggtatcctaacggaaatgcaggctgaagaagaccgcgtacgttcagtgatcattgggatcggcattaacgttaaccagcagcctaatgattttccagatgaattgaaggacatcgcgacaagcctcagccaagctgctggggaaaaaattgatcgggccggcgtcatccagcatattttactatgctttgagaaacggtaccgggattatatgacgcacggatttacgccgattaagcttttatgggaaagctatgcgctcggtattggcactaatatgagagccagaacgttaaacggaaccttttacggtaaggcgttaggtatagatgatgaaggcgttctgcttttagaaacgaacgaaggcattaaaaaaatctattctgccgatatcgaattgggctaatgtgttggtacaagcccgttgattttggtatacttccattgggcagtatcgcctgcgaactgcacctattattaaaatagatagacattgcagcagtctgccttgatccaaaaaaggactgggacagagggatgaaactcgccgaactttagaaagtgaagaatccttctcgttgtaacggaaggttttttggcttgc

SEQ ID NO: 195608 - DNA, 6540 bp, Bacillus subtilis; identical to SEQ ID NO: 195607

SEQ ID NO: 195609 - DNA, 6540 bp, Bacillus subtilis; identical to SEQ ID NO: 195607

SEQ ID NO: 195610 - DNA, 1612 bp, Bacillus subtilis
aagcttggcaacaaatgagccgtcttgtcctcatgatactcgttgctttatttcatataaaagggctcgtcatcggatttacagtgctaattatgccatggcaagcatcaaatcccttcagacaccgtacttatggccgctgattccctttaacggaaaggcgctgtggcaggtgcttgtcccgacagcgaaacctggcgcaaaagtaagacccagcatcgttcaccccaaaaatcgcttaaggcagcctaccaattcataatcgcattgaaactgactgaagagtatgataatgtatgtcttaattatgaagggacagtccataaaactgtcctttcatccataagcggagaaagagggaatgacattgttcttacacggcacaagcagacaaaatcaacatggtcatttagaaatcggaggtgtggatgctctctatttagcggagaaatatggtacacctctttacgtatatgatgtggctttaatacgtgagcgtgctaaaagctttaagcaggcgtttatttctgcagggctgaaagcacaggtggcatatgcgagcaaagcattctcatcagtcgcaatgattcagctcgctgaggaagagggactttctttagatgtcgtatccggaggagagctatatacggctgttgcagcaggctttccggcagaacgcatccactttcatggaaacaataagagcagggaagaactgcggatggcgcttgagcaccgcatcggctgcattgtggtggataatttctatgaaatcgcgcttcttgaagacctatgtaaagaaacgggtcactccatcgatgttcttcttcggatcacgcccggagtagaagcgcatacgcatgactacattacaacgggccaggaagattcaaagtttggtttcgatcttcataacggacaaactgaacgggccattgaacaagtattacaatcggaacacattcagctgctgggtgtccattgccatatcggctcgcaaatctttgatacggccggttttgtgttagcagcggaaaaaatcttcaaaaaactagacgaatggagagattcatattcatttgtatccaaggtgctgaatcttggaggaggtttcggtattcgttatacggaagatgatgaaccgcttcatgccactgaatacgttgaaaaaattatcgaagctgtgaaagaaaatgcttcccgttacggttttgacattccggaaatttggatcgaaccgggccgttctctcgtgggagacgcaggcacaactctttatacggttggctctcaaaaagaagtggataagctgtacaatcgtttcatcattcggcgtgcgaattaagaaaggtctcattgcgcctgtaaagcttacgcgtatttctgctccttcaagcacctttagtgcatccagcatatattttggactaaaagagatatttaattcctcaccttcaatttgatccgcaacaattgcttccacaactttaccgatttctggcgaattggaagaaatttcaatggattcagccggttttgcggacagttttacaacgttgttgcgtccctctctagctaaaagagatgcacgatcaatggcctgaaggaattc

SEQ ID NO: 195611 - DNA, 1612 bp, Bacillus subtilis; identical to SEQ ID NO: 195610

SEQ ID NO: 195612 - DNA, 1612 bp, Bacillus subtilis; identical to SEQ ID NO: 195610

SEQ ID NO: 195613 - DNA, 3360 bp, Bacillus subtilis
  modified_base (2982)..(2982): a, c, g, t, unknown, or other
ataatacacacttatacagactcctaaataagaaattaaatgattgggagtgcgaaaatgaaggatgtttcaaaaaatcaagaagaaaatataagcgacacggcattaacaaacgaactgattcatctgcttggccattcccggcatgattggatgaataagctgcagctgattaaaggaaacttaagcttacagaagtatgaccgtgtctttgaaatgattgaagaaatggttatagacgcaaagcacgaatcaaagctctcaaacctgaaaacaccgcatttggcgtttgattttcttacgtttaattggaaaacccattatatgacgcttgaatatgaagttctcggagaaattaaggatttgtcggcttatgatcaaaagctggcgaaactgatgagaaagctgtttcatctgtttgatcaagcagtcagcagagagagtgaaaatcatttaacggtttcgcttcaaacggatcatcctgacagacagctgattctgtaccttgattttcacggcgcctttgccgatccatctgcttttgatgatattcggcagaatggatatgaggacgttgatatcatgcgttttgaaatcacgagtcacgaatgtctgattgaaattgggttggactagcggagtttttaacggtttagaacggaggacattatgtttgtagatcaggtcaaagtatatgtaaaaggcggcgacggcggcaacggtatggttgcgtttcgccgtgaaaaatatgtgccgaaaggcggccctgccggcggtgacggaggaaagggaggagacgtcgtttttgaagtagatgaaggtctccgcaccctgatggattttagatacaaaaaacactttaaagcgattcgcggcgagcatggcatgtccaaaaaccagcacgggcgaaatgctgatgatatggtcattaaagttccgccgggcaccgttgtgacagacgatgatacaaaacaggtcatcgctgatttaacagagcacggacagcgggctgtcattgcaagaggcggaagaggcggaagaggaaatagccgctttgctacaccggctaatcccgcgcctcagctttcagaaaacggcgagccgggaaaagaacgctacattgttcttgaattaaaagtgcttgcagatgtcggacttgtcgggttcccgagtgtgggaaaatctactttgctgtctgttgtctcatctgcaaaaccgaaaattgcggactatcactttacaacgcttgtcccgaatctcggcatggttgaaacggatgacggacgcagctttgtcatggctgatttgccagggctgattgaaggcgcacaccaaggcgtcggactgggccaccagtttttgcgccatattgaacggacgagggttattgttcatgtcattgacatgtcaggcttagaaggccgtgatccatatgatgattatcttacgattaaccaggagctgagcgagtacaatctgcgtctcactgagcgtccgcaaattatcgttgcaaataaaatggacatgccggaggctgcggaaaatctcgaagcctttaaagaaaagctgacggatgattatccggtattcccgatcagtgcggtgacaagagaaggtctgcgtgagcttctgtttgaggttgccaatcagcttgagaacacaccggaattcccgctgtatgacgaggaagagcttacacaaaaccgtgtcatgtacacgatggaaaatgaagaagtgccatttaacattacacgcgatccagacggtgtatttgtgctttcaggagacagccttgagcggttattcaagatgactgatttctcacgtgatgaatcggttaaacggtttgcaagacagatgcgcggaatgggtgttgatgaagcactcagagaacgcggagccaaggatggagatataatcaggcttctggaatttgaatttgaatttattgattaatcaatgttggctgaaaagagagcctggtgccaggctctctattttaaaggggggatgcaaatgaaagaggagacattttatcttgtccgtgaagatgtattgcccgatgcaatgagaaaaacattagaagtcaaaaagctgcttgatcgacaaaaagcagattcagtagcagatgccgttcaaaaggtcgatttaagtagaagtgcgttttataaatacagggatgctgtttttccattctacaccatggtaaaagaacaaattatcacacttttctttcatttggaggataggtcaggtgcgttatctcagcttcttcaggcggtagctgattctggaagcaacgttctttccattcaccagaccattccgcttcaaggcagagcaaatgtgacactgtctatcagtacgtcggcaatggaagaagacattcatacattaatgaataagctcaggaagtttgattttgtagaaaaggttgaaatattaggttcaggtgcataagggagagaaaatcgtcatgaaagtcggttatttaggtccagcagctacatttacacatctagcagtcagttcttgttttcaaaacggcgccgaacatgttgcttaccgcaccattccggagtgtatagatgcagccgttgcaggcgaagttgattttgcttttgttcctttggaaaatgctttagaaggatctgttaatctaacaatagactatttaatacatgaacagcctttgccaatcgtgggtgaaatgacgttgccgattcaccagcacttgctcgtccatccctcaagagagaatgcatggaaagagctcgacaaaatttactcacattcacacgcgattgcgcaatgccataaatttcttcatcgacattttccttccgttccatatgaatacgccaattctaccggggcggcagcaaagtttgtcagtgaccatcccgagctgaatatcggggtcattgccaatgatatggcagcttctacatacgaattaaaaatcgtgaaacgggatatacnggattatagggacaatcatacaagatttattatcctgtctcccgatgaaaacatatcttttgaagtgaattcaaaattgagctctaggcccaaaacgaccttaatggtcatgctgccgcaggatgatcagtccggggcgctgcatagagtgctgtctgcattttcttggagaaatttaaacctgtcaaaaattgagtcacgtccgactaaaaccggattaggccattatttctttattattgatattgagaaagcgtttgatgatgtattgattccaggggccatgcaggagcttgaagcactcggctgcaaagtgaggcttctgggtgcataccagtcttaccaattataaaaaaagcccactagagggcttttttt

SEQ ID NO: 195614 - DNA, 3360 bp, Bacillus subtilis; identical to SEQ ID NO: 195613
  modified_base (2982)..(2982): a, c, g, t, unknown, or other

SEQ ID NO: 195615 - DNA, 3360 bp, Bacillus subtilis; identical to SEQ ID NO: 195613
  modified_base (2982)..(2982): a, c, g, t, unknown, or other

SEQ ID NO: 195616 - DNA, 2403 bp, Bacillus subtilis
gaattcatgtaaaagatgaggttggttcattctcgaaaattacatctgtgttctcagagcggggcgtgacgtttgaaaaaatccttcagctgccaattaaaggccatgatgagttagctgaaatcgtaattgtcacacatcatacatcagaagctgatttcagtgatatcctgcaaaacctaaatgatttggaagtcgttcaagaagtcaaaagcacatatcgtgtagaagggaacggttggagctaatgtggaaaggacttatccatcaatataaagaatttttacctgtaacagatcaaacaccggcgctaactttacatgaaggaaacacacctcttattcacctgccgaagctgtctgagcagctcggaattgagcttcatgtcaaaacggaaggcgtcaatcctacgggatcatttaaagatcgcggaatggttatggctgtggcaaaggcaaaagaagaaggcaatgacacgattatgtgcgcgtcaacaggtaacacttccgctgctgcggcagcatatgcagcccgtgctaacatgaaatgcattgtcatcatcccgaacggaaaaattgcatttggaaaactcgctcaagctgtcatgtacggagccgagattatcgcaattgacggaaactttgacgatgcgcttaaaattgtccgttccatctgtgagaaatcaccgattgcccttgtcaactcagtcaacccttaccgcattgaaggccaaaaaactgctgccttcgaagtgtgcgaacagctgggggaagcgcctgatgttttagcgatcccggtcggaaatgctggaaacatcactgcgtactggaagggcttcaaggaatatcatgagaaaaacggcacaggccttccgaaaatgcgcggctttgaagctgagggtgcggcggcaatcgtgcgcaatgaagtgattgaaaatccggaaacaatagcgacagccattcgtatcggaaacccggcaagctgggacaaagctgtaaaggcagccgaggaatccaatgggaaaattgacgaagtcactgatgatgaaatccttcacgcatatcagctgatcgcccgtgtagaaggcgtgtttgcagaaccaggttcttgcgcgtctatcgcaggagtgctgaaacaggtgaaatccggagaaattccgaaaggcagcaaggtcgtagctgtgttaacaggaaacggactgaaagatccgaacacagcggtcgacatttcagaaatcaagcctgtcacattgccgactgatgaagacagcatccttgaatatgtaaaaggagcggcccgtgtatgaacgaagccgacatgctgttctctgtcactgttcccggaagcacagctaacctaggccccggctttgattcagtcggaatggcgctcagcagatatttgaagctgaccgtctttgaaagcgacaaatggtcttttgaggctgaaacagaaacagtcgccggaattccgggcggtacagataacctgatctaccaagtggctaaacggaccgcagatttgtacggaaaagaaatgcctcctgtccatgtgaaggtgtggagcgacatcccgcttgcacgcggccttggcagcagcgccgcagcgattgtagcggccattgaactggctgatgaattatgcggcttaaagctgtctgaagcggacaagctgcatttagcgagtctagaagaaggacacccggacaatgctggcgcttctctcgtcggcggacttgtgatcggcctgcatgaggatgacgagacccaaatgatccgcgtcccgaatgctgacattgacgtagtcgttgtcattcctttttatgaagtgctgacaagagacgcgagagacgtgcttccgaaggagtttccatatgccgatgccgtaaaagcaagtgctgtcagcaatatcctcattgctgcgatcatgtccaaggattggccgcttgtcgggaaaatcatgaagaaggatatgttccatcagccgtaccgggcgatgcttgtgcctgagctgtcaaaagtagagcacgtcgccgagatgaagggcgcatatggaacggctctcagcggagcaggcccaacgattctcgtcatgaccgaaaaaggaaagggagaagagctaaaagaacagctcgcgcttcatttccctcattgtgaagtagacgctttgaccgttccgaaagagggaagtataatagagcgaaatcctttatatcaagtaaaaagtgtatagatcatgccaagcgttcctcagcgtcagcggagggcgcctttttttgctggagataaaggagttttattagaaacgaatacatgtaaaggaggagatgaatatgaaaagctgataaccgcagacgacatcacagcgattgtctctgtgaccagtcctcaatacgccccagac

SEQ ID NO: 195617 - DNA, 2403 bp, Bacillus subtilis; identical to SEQ ID NO: 195616

SEQ ID NO: 195618 - DNA, 2403 bp, Bacillus subtilis; identical to SEQ ID NO: 195616

SEQ ID NO: 195619 - DNA, 2525 bp, Bacillus subtilis
ctcgagccaacaccgagagagacatacggcgggtgtattgcctacattgggtttgacgggaatatcgactcttgtattacgattcgcacgatgagtgtaaagaacggtgttgcatcgatacaggcaggtgctggcattgttgctgattctgttccggaagccgaatacgaagaaagctgtaataaagccggtgcgctgctgaaaacgattcatattgcagaagacatgtttcatagcaaggaggataaagctgatgaacagatttctacaattgtgcgttgacggaaaaacccttactgccggtgaggctgaaacgctgatgaatatgatgatggcagcggaaatgactccttctgaaatgggggggatattgtcaattcttgctcatcggggggagacgccagaagagcttgcgggttttgtgaaggcaatgcgggcacacgctcttacagtcgatggacttcctgatattgttgatacatgcggaacagggggagacggtatttccacttttaatatctcaacggcctcggcaattgttgcctcggcagctggtgcgaaaatcgctaagcatggcaatcgctctgtctcttctaaaagcggaagcgctgatgttttagaggagctagaggtttctattcaaaccactcccgaaaaggtcaaaagcagcattgaaacaaacaacatgggatttctttttgcgccgctttaccattcgtctatgaaacatgtagcaggtactagaaaagagctaggtttcagaacggtatttaatctgcttgggccgctcagcaatcctttacaggcgaagcgtcaggtgattggggtctattctgttgaaaaagctggactgatggcaagcgcactggagacgtttcagccgaagcacgtcatgtttgtatcaagccgtgacggtttagatgagctttcaattacagcaccgaccgacgtgattgaattaaaggacggagagcgccgggaatataccgtttcacccgaagatttcggtttcacaaatggcagacttgaagatttacaggtgcagtcaccgaaagagagcgcctatctcattcagaatatttttgaaaataaaagcagcagttccgctttatctattacggcttttaatgcgggagctgcgatttacacggcgggaattaccgcctcactgaaggaaggaacggagctggcgttagagacgattacaagcggaggcgctgccgcgcagcttgaacgactaaagcagaaagaggaagagatctatgcttgaaaaaatcatcaaacaaaagaaagaagaagtgaaaacactggttttgccggtagagcagcctttcgagaaacgttcatttaaggaggcgctggcaagcccgaatcggtttatcgggttgattgccgaagtgaagaaagcatcgccgtcaaaagggcttattaaagaggattttgtgcctgtgcagattgcaatagactatgaggctgcgaaggcagatgcgatttccgttttaacagacaccccgttttttcaaggggaaaacagttatttatcagacgtaaagcgtgctgtttcgattcctgtacttagaaaagattttattcttgattctcttcaagtagaggaatcaagaagaatcggagcggatgccatattgttaatcggcgaggtgcttgatcccttacaccttcatgaattatatcttgaagcaggtgaaaaggggatggacgtgttagtggaggttcatgatgcatcaacgctagaacaaatattgaaagtgttcacacccgacattctcggcgtaaataatcgaaacctaaaaacgtttgaaacatctgtaaagcagacagaacaaatcgcatctctcgttccgaaagaatccttgcttgtcagcgaaagcggaatcggttctttagaacatttaacatttgtcaatgaacatggggcgcgagctgtacttatcggtgaatcattgatgagacaaacttctcagcgtaaagcaatccatgctttgtttagggagtgaggttgtgaagaaaccggcattaaaatattgcggtattcggtcactaaaggatttgcagcttgcggcggaatcacaggctgattacctaggatttatttttgctaaaagcaaacgaaaagtatctccggaagatgtgaaaaaatggctgaaccaagttcgtgtcgaaaaacaggttgcaggtgtttttgttaatgaatcaatagagacgatgtcacgtattgccaagagcttgaagctcgacgtcattcagcttcacggtgatgaaaaaccggcggatgctgctgctcttcgcaagctgacaggctgtgaaatatggaaggcgcttcaccatcaagataacacaactcaagaaatagcccgctttaaagataatgttgacggctttgtgattgattcatctgtaaaagggtctagaggcggaactggtgttgcattttcttgggaatgtgtgccggaatatcagcaggcggctattggtaaacgctgttttatcgcaggcggcgtggatcc

SEQ ID NO: 195620 - DNA, 2525 bp, Bacillus subtilis; identical to SEQ ID NO: 195619

SEQ ID NO: 195621 - DNA, 2525 bp, Bacillus subtilis; identical to SEQ ID NO: 195619

SEQ ID NO: 195622 - DNA, 2064 bp, Saccharomyces cerevisiae
atgacaacggaagatccagattcaaatcacttaagttccgaaactggcattaaattggcattggacccgaacttaattacattggcactaagttctaatccaaactctagccttcattcaccaacgtctgatgaacccgtacctgaatctgcaggaaaagcagatactagtattcgactagaaggtgatgagttagagaataaaactaagaaagacaatgataagaacttaaaatttttgaagaataaagattctctagtcagtaatccacacgaaatttatggctccatgccgttggagcaattgatcccaatcatcttaagacagcgtggtccaggctttaaattcgttgatttaaatgaaaaagaattgcaaaatgagattaagcagcttggtagtgatagtagtgacggtcataacagcgagaagaaggacactgatggcgctgatgagaatgtacaaattggagaagatttcatggaagtggattatgaagataaagataatccagtggattcacgaaatgaaacagaccacaaaacgaatgaaaatggcgagaccgatgataatattgaaacggtaatgacacaggaacagtttgttaaaagaaggagggatatgctagagcatataaatctggccatgaacgaatcgtctttggctttggaattcgtttctttgctactgtcgagtgttaaagagtctacaggtatgtcatcaatgtcaccatttcttaggaaagttgttaaaccttctagtttaaacagtgataaaattccatatgttgcacctacaaaaaaagaatatatcgagttggatatattgaataagggatggaagttacaaagtttaaacgaatctaaagatctcctacgcgcaagttttaataaactgagttccatattacagaacgaacatgactattggaataagataatgcagagtattagcaacaaggatgttatttttaagattagggacaggactagtggtcaaaagctgttggcaattaagtatggttacgaagactctggatctacctataagcatgacagaggtattgctaatataaggaataatatagaatcacaaaatttggatttgataccccacagtagttcagtgttcaaaggcactgatttcgtacattcagtaaagaaattcttaagggttcgtatcttcacaaaaatcgaatcagaagatgattacatattgagtggcgaaagtgtgatggatagggatagtgaaagtgaagaagctgaaacgaaagatatcagaaagcaaatccaacttttgaaaaagatcatttttgaaaaagaactgatgtaccaaataaagaaagaatgcgctttgttgatttcctatggtgtcagtattgaaaacgaaaacaaggtaataattgaactacctaacgaaaaatttgaaatcgagttgttgtcccttgacgatgactccattgtcaatcatgaacaagacttaccaaaaatcaacgacaagagagcaaatttaatgcttgttatgttgagactattattagtcgttatattcaagaaaacattacgatcgagaataagctcaccccacggactgatcaatttgaatgttgacgatgatatcttaataatacgtcccattcttggtaaagttcggtttgctaattacaaactgttactaaaaaaaatcataaaggattacgtgctcgatatagttcctggctcaagtataacagaaacggaagttgagagagaacaacctcaagaaaataaaaacattgatgatgaaaatataactaaattaaataaagagatccgtgccttcgataaactattgaatatacctagacgtgaactcaaaataaatctaccattaactgagcacaaaagccctaatctaagtttaatgctcgaaagtcctaactattgtaacgcactcattcacatcaagttttcagctggtacggaagccaacgcagtgtcctttgacacaacattttctgattttaaagaagtagaggacttcctacattttattgtcgctgagtacatccagcaaaagaaggtgtaa

SEQ ID NO: 195623 - DNA, 2064 bp, Saccharomyces cerevisiae; identical to SEQ ID NO: 195622

SEQ ID NO: 195624 - DNA, 2064 bp, Saccharomyces cerevisiae; identical to SEQ ID NO: 195622

SEQ ID NO: 195625 - DNA, 723 bp, Saccharomyces cerevisiae
atggccgatgaggaacgtttaaaggagtttaaagaggcaaacaagatagtgtttgatccaaataccagacaagtatgggaaaaccagaatcgagatggtacaaaaccagcaactactttccagagtgaagaggacataaaaagagctgccccagaatctgaaaaagacacctccgccacatcaggtattgttccaacactacaaaacattgtggcaactgtgactttggggtgcaggttagatctgaaaacagttgcgctacatgcccgtaatgcagaatataaccccaagcgttttgctgctgtcatcatgcgtattagagagccaaaaactacagctttaatttttgcctcagggaaaatggttgttaccggtgcaaaaagtgaggatgactcaaagctggccagtagaaaatatgcaagaattatccaaaaaatcgggtttgctgctaaattcacagacttcaaaatacaaaatattgtcggttcgtgtgacgttaaattccctatacgtctagaagggttagcattcagtcatggtactttctcctcctatgagccagaattgtttcctggtttgatctatagaatggtgaagccgaaaattgtgttgttaatttttgtttcaggaaagattgttcttactggtgcaaagcaaagggaagaaatttaccaagcttttgaagctatataccctgtgctaagtgaatttagaaaaatgtga

SEQ ID NO: 195626 - DNA, 723 bp, Saccharomyces cerevisiae; identical to SEQ ID NO: 195625

SEQ ID NO: 195627 - DNA, 723 bp, Saccharomyces cerevisiae; identical to SEQ ID NO: 195625

SEQ ID NO: 195628 - DNA, 1118 bp, Saccharomyces cerevisiae
aggttgctgctttggttattgataacggttctggtatgtgtaaagccggttttgccggtgacgacgctcctcgtgctgtcttcccatctatcgtcggtagaccaagacaccaaggtatcatggtcggtatgggtcaaaaagactcctacgttggtgatgaagctcaatccaagagaggtatcttgactttacgttacccaattgaacacggtattgtcaccaactgggacgatatggaaaagatctggcatcataccttctacaacgaattgagagttgccccagaagaacaccctgttcttttgactgaagctccaatgaaccctaaatcaaacagagaaaagatgactcaaattatgtttgaaactttcaacgttccagccttctacgtttccatccaagccgttttgtccttgtactcttccggtagaactactggtattgttttggattccggtgatggtgttactcacgtcgttccaatttacgctggtttctctctacctcacgccattttgagaatcgatttggccggtagagatttgactgactacttgatgaagatcttgagtgaacgtggttactctttctccaccactgctgaaagagaaattgtccgtgacatcaaggaaaaactatgttacgtcgccttggacttcgaacaagaaatgcaaaccgctgctcaatcttcttcaattgaaaaatcctacgaacttccagatggtcaagtcatcactattggtaacgaaagattcagagccccagaagctttgttccatccttctgttttgggtttggaatctgccggtattgaccaaactacttacaactccatcatgaagtgtgatgtcgatgtccgtaaggaattatacggtaacatcgttatgtccggtggtaccaccatgttcccaggtattgccgaaagaatgcaaaaggaaatcaccgctttggctccatcttccatgaaggtcaagatcattgctcctccagaaagaaagtactccgtctggattggtggttctatcttggcttctttgactaccttccaacaaatgtggatctcaaaacaagaatacgacgaaagtggtccatctatcgttcaccacaagtgtttctaa

SEQ ID NO: 195629 - DNA, 1118 bp, Saccharomyces cerevisiae; identical to SEQ ID NO: 195628

SEQ ID NO: 195630 - DNA, 1118 bp, Saccharomyces cerevisiae; identical to SEQ ID NO: 195628

SEQ ID NO: 195631 - DNA, 6540 bp, Bacillus subtilis; identical to SEQ ID NO: 195607

SEQ ID NO: 195632 - DNA, 6540 bp, Bacillus subtilis; identical to SEQ ID NO: 195607

SEQ ID NO: 195633 - DNA, 6540 bp, Bacillus subtilis; identical to SEQ ID NO: 195607

SEQ ID NO: 195634 - DNA, 1612 bp, Bacillus subtilis; identical to SEQ ID NO: 195610

SEQ ID NO: 195635 - DNA, 1612 bp, Bacillus subtilis; identical to SEQ ID NO: 195610

SEQ ID NO: 195636 - DNA, 1612 bp, Bacillus subtilis; identical to SEQ ID NO: 195610

SEQ ID NO: 195637 - DNA, 3360 bp, Bacillus subtilis; identical to SEQ ID NO: 195613
  modified_base (2982)..(2982): a, c, g, t, unknown, or other

SEQ ID NO: 195638 - DNA, 3360 bp, Bacillus subtilis; identical to SEQ ID NO: 195613
  modified_base (2982)..(2982): a, c, g, t, unknown, or other

SEQ ID NO: 195639 - DNA, 3360 bp, Bacillus subtilis; identical to SEQ ID NO: 195613
  modified_base (2982)..(2982): a, c, g, t, unknown, or other

SEQ ID NO: 195640 - DNA, 2403 bp, Bacillus subtilis; identical to SEQ ID NO: 195616

SEQ ID NO: 195641 - DNA, 2403 bp, Bacillus subtilis; identical to SEQ ID NO: 195616

SEQ ID NO: 195642 - DNA, 2403 bp, Bacillus subtilis; identical to SEQ ID NO: 195616

SEQ ID NO: 195643 - DNA, 1049 bp, Escherichia coli; identical to SEQ ID NO: 195598

SEQ ID NO: 195644 - DNA, 1049 bp, Escherichia coli; identical to SEQ ID NO: 195598

SEQ ID NO: 195645 - DNA, 1049 bp, Escherichia coli; identical to SEQ ID NO: 195598

SEQ ID NO: 195646 - DNA, 748 bp, Escherichia coli; identical to SEQ ID NO: 195601

SEQ ID NO: 195647 - DNA, 748 bp, Escherichia coli; identical to SEQ ID NO: 195601

SEQ ID NO: 195648 - DNA, 652 bp, Escherichia coli; identical to SEQ ID NO: 195603

SEQ ID NO: 195649 - DNA, 652 bp, Escherichia coli; identical to SEQ ID NO: 195603

SEQ ID NO: 195650 - DNA, 1032 bp, Bacteriophage P1; identical to SEQ ID NO: 195605

SEQ ID NO: 195651 - DNA, 1032 bp, Bacteriophage P1; identical to SEQ ID NO: 195605

SEQ ID NO: 195652 - DNA, 25 bp, Saccharomyces cerevisiae
attaagccatgcatgtctaagtata

SEQ ID NO: 195653 - DNA, 25 bp, Saccharomyces cerevisiae
attcaaatttctgccctatcaactt

SEQ ID NO: 195654 - DNA, 25 bp, Saccharomyces cerevisiae
tcaatgtcttcggactctttgatga

SEQ ID NO: 195655 - DNA, 25 bp, Saccharomyces cerevisiae
taggatagtggcctaccatggtttc

SEQ ID NO: 195656 - DNA, 25 bp, Saccharomyces cerevisiae
gactctttgatgattcataataact

SEQ ID NO: 195657 - DNA, 25 bp, Saccharomyces cerevisiae
tcttcggactctttgatgattcata

SEQ ID NO: 195658 - DNA, 25 bp, Saccharomyces cerevisiae
ttttcgaatcgcatggccttgtgct

SEQ ID NO: 195659 - DNA, 25 bp, Saccharomyces cerevisiae
aatctcgaccctttggaagagatgt

SEQ ID NO: 195660 - DNA, 25 bp, Saccharomyces cerevisiae
atttctgccctatcaactttcgatg

SEQ ID NO: 195661 - DNA, 25 bp, Saccharomyces cerevisiae
catatgcttgtctcaaagattaagc

SEQ ID NO: 195662 - DNA, 25 bp, Saccharomyces cerevisiae
aactgcgaatggctcattaaatcag

SEQ ID NO: 195663 - DNA, 25 bp, Saccharomyces cerevisiae
atacatgcttaaaatctcgaccctt

SEQ ID NO: 195664 - DNA, 25 bp, Saccharomyces cerevisiae
tcaactttcgatggtaggatagtgg

SEQ ID NO: 195665 - DNA, 25 bp, Saccharomyces cerevisiae
ataactgtggtaattctagagctaa

SEQ ID NO: 195666 - DNA, 25 bp, Saccharomyces cerevisiae
aaatcagttatcgtttatttgatag

SEQ ID NO: 195667 - DNA, 25 bp, Saccharomyces cerevisiae
cttgtctcaaagattaagccatgca

SEQ ID NO: 195668 - DNA, 25 bp, Saccharomyces cerevisiae
atggccttgtgctggcgatggttca

SEQ ID NO: 195669 - DNA, 25 bp, Saccharomyces cerevisiae
ccatgcatgtctaagtataagcaat

SEQ ID NO: 195670 - DNA, 25 bp, Saccharomyces cerevisiae
tttatacagtgaaactgcgaatggc

SEQ ID NO: 195671 - DNA, 25 bp, Saccharomyces cerevisiae
agtagtcatatgcttgtctcaaaga

SEQ ID NO: 195672 - DNA, 25 bp, Saccharomyces cerevisiae
gaatggctcattaaatcagttatcg

SEQ ID NO: 195673 - DNA, 25 bp, Saccharomyces cerevisiae
ctaccacatccaaggaaggcagcag

SEQ ID NO: 195674 - DNA, 25 bp, Saccharomyces cerevisiae
cgcggtaattccagctccaatagcg

SEQ ID NO: 195675 - DNA, 25 bp, Saccharomyces cerevisiae
gcaggcgcgcaaattacccaatcct

SEQ ID NO: 195676 - DNA, 25 bp, Saccharomyces cerevisiae
tctggtgccagcagccgcggtaatt

SEQ ID NO: 195677 - DNA, 25 bp, Saccharomyces cerevisiae
ccaaggaaggcagcaggcgcgcaaa

SEQ ID NO: 195678 - DNA, 25 bp, Saccharomyces cerevisiae
catccaaggaaggcagcaggcgcgc

SEQ ID NO: 195679 - DNA, 25 bp, Saccharomyces cerevisiae
gagggcaagtctggtgccagcagcc

SEQ ID NO: 195680 - DNA, 25 bp, Saccharomyces cerevisiae
ggtgccagcagccgcggtaattcca

SEQ ID NO: 195681 - DNA, 25 bp, Saccharomyces cerevisiae
caattggagggcaagtctggtgcca

SEQ ID NO: 195682 - DNA, 25 bp, Saccharomyces cerevisiae
aattccagctccaatagcgtatatt

SEQ ID NO: 195683 - DNA, 25 bp, Saccharomyces cerevisiae
taattcagggaggtagtgacaataa

SEQ ID NO: 195684 - DNA, 25 bp, Saccharomyces cerevisiae
gcagcaggcgcgcaaattacccaat

SEQ ID NO: 195685 - DNA, 25 bp, Saccharomyces cerevisiae
aagtctggtgccagcagccgcggta

SEQ ID NO: 195686 - DNA, 25 bp, Saccharomyces cerevisiae
ttggagggcaagtctggtgccagca

SEQ ID NO: 195687 - DNA, 25 bp, Saccharomyces cerevisiae
cggctaccacatccaaggaaggcag

SEQ ID NO: 195688 - DNA, 25 bp, Saccharomyces cerevisiae
tcctaattcagggaggtagtgacaa

SEQ ID NO: 195689 - DNA, 25 bp, Saccharomyces cerevisiae
aggaaggcagcaggcgcgcaaatta

SEQ ID NO: 195690 - DNA, 25 bp, Saccharomyces cerevisiae
agcagccgcggtaattccagctcca

SEQ ID NO: 195691 - DNA, 25 bp, Saccharomyces cerevisiae
agccgcggtaattccagctccaata

SEQ ID NO: 195692 - DNA, 25 bp, Saccharomyces cerevisiae
ggcgcgcaaattacccaatcctaat

SEQ ID NO: 195693 - DNA, 25 bp, Saccharomyces cerevisiae
atcagtattcaattgtcagaggtga

SEQ ID NO: 195694 - DNA, 25 bp, Saccharomyces cerevisiae
ctaaccttgagtccttgtggctctt

SEQ ID NO: 195695 - DNA, 25 bp, Saccharomyces cerevisiae
agtccttgtggctcttggcgaacca

SEQ ID NO: 195696 - DNA, 25 bp, Saccharomyces cerevisiae
tgtggctcttggcgaaccaggactt

SEQ ID NO: 195697 - DNA, 25 bp, Saccharomyces cerevisiae
agtattcaattgtcagaggtgaaat

SEQ ID NO: 195698 - DNA, 25 bp, Saccharomyces cerevisiae
cttaaccataaactatgccgactag

SEQ ID NO: 195699 - DNA, 25 bp, Saccharomyces cerevisiae
aactactgcgaaagcatttgccaag

SEQ ID NO: 195700 - DNA, 25 bp, Saccharomyces cerevisiae
aagactaactactgcgaaagcattt

SEQ ID NO: 195701 - DNA, 25 bp, Saccharomyces cerevisiae
ttgaagactaactactgcgaaagca

SEQ ID NO: 195702 - DNA, 25 bp, Saccharomyces cerevisiae
tggtttctaggaccatcgtaatgat

SEQ ID NO: 195703 - DNA, 25 bp, Saccharomyces cerevisiae
ccttgtggctcttggcgaaccagga

SEQ ID NO: 195704 - DNA, 25 bp, Saccharomyces cerevisiae
agcatttgccaaggacgttttcatt

SEQ ID NO: 195705 - DNA, 25 bp, Saccharomyces cerevisiae
tgccaaggacgttttcattaatcaa

SEQ ID NO: 195706 - DNA, 25 bp, Saccharomyces cerevisiae
tgcgaaagcatttgccaaggacgtt

SEQ ID NO: 195707 - DNA, 25 bp, Saccharomyces cerevisiae
atgatcagataccgtcgtagtctta

SEQ ID NO: 195708 - DNA, 25 bp, Saccharomyces cerevisiae
actatgccgactagggatcgggtgg

SEQ ID NO: 195709 - DNA, 25 bp, Saccharomyces cerevisiae
aagatgatcagataccgtcgtagtc

SEQ ID NO: 195710 - DNA, 25 bp, Saccharomyces cerevisiae
tgttggtttctaggaccatcgtaat

SEQ ID NO: 195711 - DNA, 25 bp, Saccharomyces cerevisiae
tgttcaaagcaggcgtattgctcga

SEQ ID NO: 195712 - DNA, 25 bp, Saccharomyces cerevisiae
gagtgttcaaagcaggcgtattgct

SEQ ID NO: 195713 - DNA, 25 bp, Saccharomyces cerevisiae
tttctaggaccatcgtaatgattaa

SEQ ID NO: 195714 - DNA, 25 bp, Saccharomyces cerevisiae
ggtggtgcatggccgttcttagttg

SEQ ID NO: 195715 - DNA, 25 bp, Saccharomyces cerevisiae
gcatggccgttcttagttggtggag

SEQ ID NO: 195716 - DNA, 25 bp, Saccharomyces cerevisiae
caccaggagtggagcctgcggctta

SEQ ID NO: 195717 - DNA, 25 bp, Saccharomyces cerevisiae
caccaggtccagacacaataaggat

SEQ ID NO: 195718 - DNA, 25 bp, Saccharomyces cerevisiae
ggtgctagcatttgctggttatcca

SEQ ID NO: 195719 - DNA, 25 bp, Saccharomyces cerevisiae
aatagtggtgctagcatttgctggt

SEQ ID NO: 195720 - DNA, 25 bp, Saccharomyces cerevisiae
gagtggagcctgcggcttaatttga

SEQ ID NO: 195721 - DNA, 25 bp, Saccharomyces cerevisiae
gattgagagctctttcttgattttg

SEQ ID NO: 195722 - DNA, 25 bp, Saccharomyces cerevisiae
gaaactcaccaggtccagacacaat

SEQ ID NO: 195723 - DNA, 25 bp, Saccharomyces cerevisiae
tgctggttatccacttcttagaggg

SEQ ID NO: 195724 - DNA, 25 bp, Saccharomyces cerevisiae
agcctgcggcttaatttgactcaac

SEQ ID NO: 195725 - DNA, 25 bp, Saccharomyces cerevisiae
ctactaaatagtggtgctagcattt

SEQ ID NO: 195726 - DNA, 25 bp, Saccharomyces cerevisiae
agcatttgctggttatccacttctt

SEQ ID NO: 195727 - DNA, 25 bp, Saccharomyces cerevisiae
ttagttggtggagtgatttgtctgc

SEQ ID NO: 195728 - DNA, 25 bp, Saccharomyces cerevisiae
gagctctttcttgattttgtgggtg

SEQ ID NO: 195729 - DNA, 25 bp, Saccharomyces cerevisiae
gtccagacacaataaggattgacag

SEQ ID NO: 195730 - DNA, 25 bp, Saccharomyces cerevisiae
gtgatttgtctgcttaattgcgata

SEQ ID NO: 195731 - DNA, 25 bp, Saccharomyces cerevisiae
tgtctgcttaattgcgataacgaac

SEQ ID NO: 195732 - DNA, 25 bp, Saccharomyces cerevisiae
tggtcgcaaggctgaaacttaaagg

SEQ ID NO: 195733 - DNA, 25 bp, Saccharomyces cerevisiae
ttatccacttcttagagggactatc

SEQ ID NO: 195734 - DNA, 25 bp, Saccharomyces cerevisiae
tagacgttctgggccgcacgcgcgc

SEQ ID NO: 195735 - DNA, 25 bp, Saccharomyces cerevisiae
cgcgcgctacactgacggagccagc

SEQ ID NO: 195736 - DNA, 25 bp, Saccharomyces cerevisiae
gggggcaactccatctcagagcgga

SEQ ID NO: 195737 - DNA, 25 bp, Saccharomyces cerevisiae
gccgcacgcgcgctacactgacgga

SEQ ID NO: 195738 - DNA, 25 bp, Saccharomyces cerevisiae
ctgtgatgcccttagacgttctggg

SEQ ID NO: 195739 - DNA, 25 bp, Saccharomyces cerevisiae
ttagtgaggcctcaggatctgctta

SEQ ID NO: 195740 - DNA, 25 bp, Saccharomyces cerevisiae
aatggcttagtgaggcctcaggatc

SEQ ID NO: 195741 - DNA, 25 bp, Saccharomyces cerevisiae
cgtcgctagtaccgattgaatggct

SEQ ID NO: 195742 - DNA, 25 bp, Saccharomyces cerevisiae
ctagtaagcgcaagtcatcagcttg

SEQ ID NO: 195743 - DNA, 25 bp, Saccharomyces cerevisiae
tgacggagccagcgagtctaacctt

SEQ ID NO: 195744 - DNA, 25 bp, Saccharomyces cerevisiae
ttctgggccgcacgcgcgctacact

SEQ ID NO: 195745 - DNA, 25 bp, Saccharomyces cerevisiae
aactccatctcagagcggagaattt

SEQ ID NO: 195746 - DNA, 25 bp, Saccharomyces cerevisiae
aatcttgtgaaactccgtcgtgctg

SEQ ID NO: 195747 - DNA, 25 bp, Saccharomyces cerevisiae
cagcttgcgttgattacgtccctgc

SEQ ID NO: 195748 - DNA, 25 bp, Saccharomyces cerevisiae
gaattcctagtaagcgcaagtcatc

SEQ ID NO: 195749 - DNA, 25 bp, Saccharomyces cerevisiae
aggcctcaggatctgcttagagaag

SEQ ID NO: 195750 - DNA, 25 bp, Saccharomyces cerevisiae
cgattgaatggcttagtgaggcctc

SEQ ID NO: 195751 - DNA, 25 bp, Saccharomyces cerevisiae
tggacaaacttggtcatttagagga

SEQ ID NO: 195752 - DNA, 25 bp, Saccharomyces cerevisiae
ttgtaattattgctcttcaacgagg

SEQ ID NO: 195753 - DNA, 25 bp, Saccharomyces cerevisiae
agtcatcagcttgcgttgattacgt

SEQ ID NO: 195754 - DNA, 25 bp, Saccharomyces cerevisiae
atcaggtaggagtacccgctgaact

SEQ ID NO: 195755 - DNA, 25 bp, Saccharomyces cerevisiae
gtgccttcgaagagtcgagttgttt

SEQ ID NO: 195756 - DNA, 25 bp, Saccharomyces cerevisiae
aagagtcgagttgtttgggaatgca

SEQ ID NO: 195757 - DNA, 25 bp, Saccharomyces cerevisiae
ttgtctatgttccttggaacaggac

SEQ ID NO: 195758 - DNA, 25 bp, Saccharomyces cerevisiae
ggtgcccgagttgtaatttggagag

SEQ ID NO: 195759 - DNA, 25 bp, Saccharomyces cerevisiae
aacggcgagtgaagcggcaaaagct

SEQ ID NO: 195760 - DNA, 25 bp, Saccharomyces cerevisiae
attggcgagagaccgatagcgaaca

SEQ ID NO: 195761 - DNA, 25 bp, Saccharomyces cerevisiae
taggagtacccgctgaacttaagca

SEQ ID NO: 195762 - DNA, 25 bp, Saccharomyces cerevisiae
cgagttgtttgggaatgcagctcta

SEQ ID NO: 195763 - DNA, 25 bp, Saccharomyces cerevisiae
agctcaaatttgaaatctggtacct

SEQ ID NO: 195764 - DNA, 25 bp, Saccharomyces cerevisiae
ctgaacttaagcatatcaataagcg

SEQ ID NO: 195765 - DNA, 25 bp, Saccharomyces cerevisiae
acaggacgtcatagagggtgagaat

SEQ ID NO: 195766 - DNA, 25 bp, Saccharomyces cerevisiae
cttggaacaggacgtcatagagggt

SEQ ID NO: 195767 - DNA, 25 bp, Saccharomyces cerevisiae
agcatatcaataagcggaggaaaag

SEQ ID NO: 195768 - DNA, 25 bp, Saccharomyces cerevisiae
aaagtgccttcgaagagtcgagttg

SEQ ID NO: 195769 - DNA, 25 bp, Saccharomyces cerevisiae
gtaaattccatctaaagctaaatat

SEQ ID NO: 195770 - DNA, 25 bp, Saccharomyces cerevisiae
tacccgctgaacttaagcatatcaa

SEQ ID NO: 195771 - DNA, 25 bp, Saccharomyces cerevisiae
gattgccttagtaacggcgagtgaa

SEQ ID NO: 195772 - DNA, 25 bp, Saccharomyces cerevisiae
atattggcgagagaccgatagcgaa

SEQ ID NO: 195773 - DNA, 25 bp, Saccharomyces cerevisiae
tctggtaccttcggtgcccgagttg

SEQ ID NO: 195774 - DNA, 25 bp, Saccharomyces cerevisiae
tgacctcaaatcaggtaggagtacc

SEQ ID NO: 195775 - DNA, 25 bp, Saccharomyces cerevisiae
agcggttctgacgtgcaaatcgatc

SEQ ID NO: 195776 - DNA, 25 bp, Saccharomyces cerevisiae
accatctagtagctggttcctgccg

SEQ ID NO: 195777 - DNA, 25 bp, Saccharomyces cerevisiae
tagtagctggttcctgccgaagttt

SEQ ID NO: 195778 - DNA, 25 bp, Saccharomyces cerevisiae
ctatgcctgaatagggtgaagccag

SEQ ID NO: 195779 - DNA, 25 bp, Saccharomyces cerevisiae
cctgccgaagtttccctcaggatag

SEQ ID NO: 195780 - DNA, 25 bp, Saccharomyces cerevisiae
ctgatgtcttcggatggatttgagt

SEQ ID NO: 195781 - DNA, 25 bp, Saccharomyces cerevisiae
gctcgtagcggttctgacgtgcaaa

SEQ ID NO: 195782 - DNA, 25 bp, Saccharomyces cerevisiae
gctcgtatcagttttatgaggtaaa

SEQ ID NO: 195783 - DNA, 25 bp, Saccharomyces cerevisiae
aagactaatcgaaccatctagtagc

SEQ ID NO: 195784 - DNA, 25 bp, Saccharomyces cerevisiae
tccctcaggatagcagaagctcgta

SEQ ID NO: 195785 - DNA, 25 bp, Saccharomyces cerevisiae
gaagtttccctcaggatagcagaag

SEQ ID NO: 195786 - DNA, 25 bp, Saccharomyces cerevisiae
aatcgaaccatctagtagctggttc

SEQ ID NO: 195787 - DNA, 25 bp, Saccharomyces cerevisiae
taagagcatagctgttgggacccga

SEQ ID NO: 195788 - DNA, 25 bp, Saccharomyces cerevisiae
tgaccttgacctattctcaaacttt

SEQ ID NO: 195789 - DNA, 25 bp, Saccharomyces cerevisiae
gcagaagctcgtatcagttttatga

SEQ ID NO: 195790 - DNA, 25 bp, Saccharomyces cerevisiae
tcttcggatggatttgagtaagagc

SEQ ID NO: 195791 - DNA, 25 bp, Saccharomyces cerevisiae
ccgatcctgatgtcttcggatggat

SEQ ID NO: 195792 - DNA, 25 bp, Saccharomyces cerevisiae
gtgcaaatcgatcgtcgaatttggg

SEQ ID NO: 195793 - DNA, 25 bp, Saccharomyces cerevisiae
aatcgaccgatcctgatgtcttcgg

SEQ ID NO: 195794 - DNA, 25 bp, Saccharomyces cerevisiae
atcgatcgtcgaatttgggtatagg

SEQ ID NO: 195795 - DNA, 25 bp, Saccharomyces cerevisiae
cgatcctaagagatggggaagctcc

SEQ ID NO: 195796 - DNA, 25 bp, Saccharomyces cerevisiae
ggatatggattcttcacggtaacgt

SEQ ID NO: 195797 - DNA, 25 bp, Saccharomyces cerevisiae
taacagcttatcaccccggaattgg

SEQ ID NO: 195798 - DNA, 25 bp, Saccharomyces cerevisiae
aaaggcctgattttatgcaggccac

SEQ ID NO: 195799 - DNA, 25 bp, Saccharomyces cerevisiae
gttaagattccggaacctggatatg

SEQ ID NO: 195800 - DNA, 25 bp, Saccharomyces cerevisiae
ctgattttatgcaggccaccatcga

SEQ ID NO: 195801 - DNA, 25 bp, Saccharomyces cerevisiae
gtttatccggagatggggtcttatg

SEQ ID NO: 195802 - DNA, 25 bp, Saccharomyces cerevisiae
gtaacgtaactgaatgtggagacgt

SEQ ID NO: 195803 - DNA, 25 bp, Saccharomyces cerevisiae
tcttcttaacagcttatcaccccgg

SEQ ID NO: 195804 - DNA, 25 bp, Saccharomyces cerevisiae
gttagtcgatcctaagagatgggga

SEQ ID NO: 195805 - DNA, 25 bp, Saccharomyces cerevisiae
atcttttcttcttaacagcttatca

SEQ ID NO: 195806 - DNA, 25 bp, Saccharomyces cerevisiae
cctttgctggctccggtgcgcttgt

SEQ ID NO: 195807 - DNA, 25 bp, Saccharomyces cerevisiae
ccggtgcgcttgtgacggcccgtga

SEQ ID NO: 195808 - DNA, 25 bp, Saccharomyces cerevisiae
aatgtggagacgtcggcgcgagccc

SEQ ID NO: 195809 - DNA, 25 bp, Saccharomyces cerevisiae
ttatgcaggccaccatcgaaaggga

SEQ ID NO: 195810 - DNA, 25 bp, Saccharomyces cerevisiae
tgacggcccgtgaaaatccacagga

SEQ ID NO: 195811 - DNA, 25 bp, Saccharomyces cerevisiae
attccggaacctggatatggattct

SEQ ID NO: 195812 - DNA, 25 bp, Saccharomyces cerevisiae
cgtttcaaaggcctgattttatgca

SEQ ID NO: 195813 - DNA, 25 bp, Saccharomyces cerevisiae
cgtgaaaatccacaggaaggaatag

SEQ ID NO: 195814 - DNA, 25 bp, Saccharomyces cerevisiae
ctggctccggtgcgcttgtgacggc

SEQ ID NO: 195815 - DNA, 25 bp, Saccharomyces cerevisiae
tcttatggctggaagaggccagcac

SEQ ID NO: 195816 - DNA, 25 bp, Saccharomyces cerevisiae
tctttacttattcaatgaagcggag

SEQ ID NO: 195817 - DNA, 25 bp, Saccharomyces cerevisiae
caatgaagcggagctggaattcatt

SEQ ID NO: 195818 - DNA, 25 bp, Saccharomyces cerevisiae
tggcagaatcagcggggaaagaaga

SEQ ID NO: 195819 - DNA, 25 bp, Saccharomyces cerevisiae
ctagtttgacattgtgaagagacat

SEQ ID NO: 195820 - DNA, 25 bp, Saccharomyces cerevisiae
ttgactctagtttgacattgtgaag

SEQ ID NO: 195821 - DNA, 25 bp, Saccharomyces cerevisiae
taactatgactctcttaaggtagcc

SEQ ID NO: 195822 - DNA, 25 bp, Saccharomyces cerevisiae
cttattcaatgaagcggagctggaa

SEQ ID NO: 195823 - DNA, 25 bp, Saccharomyces cerevisiae
catctaattagtgacgcgcatgaat

SEQ ID NO: 195824 - DNA, 25 bp, Saccharomyces cerevisiae
cttcggcgccagtgaaataccacta

SEQ ID NO: 195825 - DNA, 25 bp, Saccharomyces cerevisiae
attagtgacgcgcatgaatggatta

SEQ ID NO: 195826 - DNA, 25 bp, Saccharomyces cerevisiae
tgggagcttcggcgccagtgaaata

SEQ ID NO: 195827 - DNA, 25 bp, Saccharomyces cerevisiae
actgtccctatctactatctagcga

SEQ ID NO: 195828 - DNA, 25 bp, Saccharomyces cerevisiae
ttgagcttgactctagtttgacatt

SEQ ID NO: 195829 - DNA, 25 bp, Saccharomyces cerevisiae
accctgttgagcttgactctagttt

SEQ ID NO: 195830 - DNA, 25 bp, Saccharomyces cerevisiae
agggaacgggcttggcagaatcagc

SEQ ID NO: 195831 - DNA, 25 bp, Saccharomyces cerevisiae
cctatctactatctagcgaaaccac

SEQ ID NO: 195832 - DNA, 25 bp, Saccharomyces cerevisiae
cctcgtcatctaattagtgacgcgc

SEQ ID NO: 195833 - DNA, 25 bp, Saccharomyces cerevisiae
tgactctcttaaggtagccaaatgc

SEQ ID NO: 195834 - DNA, 25 bp, Saccharomyces cerevisiae
tactatctagcgaaaccacagccaa

SEQ ID NO: 195835 - DNA, 25 bp, Saccharomyces cerevisiae
ggtagccaaatgcctcgtcatctaa

SEQ ID NO: 195836 - DNA, 25 bp, Saccharomyces cerevisiae
gtctgatcaggcattgccgcgaagc

SEQ ID NO: 195837 - DNA, 25 bp, Saccharomyces cerevisiae
cgcggtgatttctttgctccacaca

SEQ ID NO: 195838 - DNA, 25 bp, Saccharomyces cerevisiae
aggccttgggtgcttgctggcgaat

SEQ ID NO: 195839 - DNA, 25 bp, Saccharomyces cerevisiae
tccatgctagaacgcggtgatttct

SEQ ID NO: 195840 - DNA, 25 bp, Saccharomyces cerevisiae
attgccgcgaagctaccatccgctg

SEQ ID NO: 195841 - DNA, 25 bp, Saccharomyces cerevisiae
gtccttgtggcgtcgctgaaccata

SEQ ID NO: 195842 - DNA, 25 bp, Saccharomyces cerevisiae
tgctggcgaattgcaatgtcatttt

SEQ ID NO: 195843 - DNA, 25 bp, Saccharomyces cerevisiae
ggattatggctgaacgcctctaagt

SEQ ID NO: 195844 - DNA, 25 bp, Saccharomyces cerevisiae
tcagaatccatgctagaacgcggtg

SEQ ID NO: 195845 - DNA, 25 bp, Saccharomyces cerevisiae
aacgcctctaagtcagaatccatgc

SEQ ID NO: 195846 - DNA, 25 bp, Saccharomyces cerevisiae
agcaggctagcaacggtgcacttgg

SEQ ID NO: 195847 - DNA, 25 bp, Saccharomyces cerevisiae
gcgaagctaccatccgctggattat

SEQ ID NO: 195848 - DNA, 25 bp, Saccharomyces cerevisiae
tttgctccacacaatatagatggat

SEQ ID NO: 195849 - DNA, 25 bp, Saccharomyces cerevisiae
taaggcgtccttgtggcgtcgctga

SEQ ID NO: 195850 - DNA, 25 bp, Saccharomyces cerevisiae
taattggtttttgcggctgtctgat

SEQ ID NO: 195851 - DNA, 25 bp, Saccharomyces cerevisiae
tgggtgcttgctggcgaattgcaat

SEQ ID NO: 195852 - DNA, 25 bp, Saccharomyces cerevisiae
cttgctggcgaattgcaatgtcatt

SEQ ID NO: 195853 - DNA, 25 bp, Saccharomyces cerevisiae
tggctgaacgcctctaagtcagaat

SEQ ID NO: 195854 - DNA, 25 bp, Saccharomyces cerevisiae
tcaggcattgccgcgaagctaccat

SEQ ID NO: 195855 - DNA, 25 bp, Saccharomyces cerevisiae
tcgctgaaccatagcaggctagcaa

SEQ ID NO: 195856 - DNA, 25 bp, Saccharomyces cerevisiae
gtggcgtcgctgaaccatagcaggc

SEQ ID NO: 195857 - DNA, 25 bp, Escherichia coli
gggctaaatccgcagcaaactgccg

SEQ ID NO: 195858 - DNA, 25 bp, Escherichia coli
cgcagcaaactgccgtgctggcagg

SEQ ID NO: 195859 - DNA, 25 bp, Escherichia coli
acagcaacgtcttgaacaggcgctg

SEQ ID NO: 195860 - DNA, 25 bp, Escherichia coli
cgtcttgaacaggcgctgatgaccc

SEQ ID NO: 195861 - DNA, 25 bp, Escherichia coli
ggtcgcgcggatcatgatgccaacc

SEQ ID NO: 195862 - DNA, 25 bp, Escherichia coli
acaggcgctgatgaccccggacacc

SEQ ID NO: 195863 - DNA, 25 bp, Escherichia coli
ggatcatgatgccaacctcttacgt

SEQ ID NO: 195864 - DNA, 25 bp, Escherichia coli
atattacaacgcggcagcattatga

SEQ ID NO: 195865 - DNA, 25 bp, Escherichia coli
tgccaacctcttacgtgcgcctttc

SEQ ID NO: 195866 - DNA, 25 bp, Escherichia coli
gcgcctttctgccggacgcgagcag

SEQ ID NO: 195867 - DNA, 25 bp, Escherichia coli
gccggacgcgagcagatgaacgaac

SEQ ID NO: 195868 - DNA, 25 bp, Escherichia coli
cgagcagatgaacgaacagactcag

SEQ ID NO: 195869 - DNA, 25 bp, Escherichia coli
gatgaacgaacagactcaggcgatg

SEQ ID NO: 195870 - DNA, 25 bp, Escherichia coli
aacagactcaggcgatgtgctttat

SEQ ID NO: 195871 - DNA, 25 bp, Escherichia coli
tcaggcgatgtgctttatggcaggc

SEQ ID NO: 195872 - DNA, 25 bp, Escherichia coli
gtgctttatggcaggcgcaaactcg

SEQ ID NO: 195873 - DNA, 25 bp, Escherichia coli
atggcaggcgcaaactcgattttct

SEQ ID NO: 195874 - DNA, 25 bp, Escherichia coli
tacggttgcaaactgctgaccacgc

SEQ ID NO: 195875 - DNA, 25 bp, Escherichia coli
caaactgctgaccacgccgaatccg

SEQ ID NO: 195876 - DNA, 25 bp, Escherichia coli
gacctgcaactgttccgcaaactgg

SEQ ID NO: 195877 - DNA, 25 bp, Escherichia coli
gacattgtcgcaagtcacagaatta

SEQ ID NO: 195878 - DNA, 25 bp, Escherichia coli
caaagcgaaagcggcaggatcgacg

SEQ ID NO: 195879 - DNA, 25 bp, Escherichia coli
attgtcgcaagtcacagaattattt

SEQ ID NO: 195880 - DNA, 25 bp, Escherichia coli
ggcaggatcgacgcgcttctgtatg

SEQ ID NO: 195881 - DNA, 25 bp, Escherichia coli
gttgctggatctgctgtttgaagcg

SEQ ID NO: 195882 - DNA, 25 bp, Escherichia coli
ggatctgctgtttgaagcgcagcag

SEQ ID NO: 195883 - DNA, 25 bp, Escherichia coli
gcgcagcaggtgcatcgccagcatt

SEQ ID NO: 195884 - DNA, 25 bp, Escherichia coli
gcaggtgcatcgccagcatttcgat

SEQ ID NO: 195885 - DNA, 25 bp, Escherichia coli
gcatcgccagcatttcgatcctcgt

SEQ ID NO: 195886 - DNA, 25 bp, Escherichia coli
gcatttcgatcctcgtcaggtgcag

SEQ ID NO: 195887 - DNA, 25 bp, Escherichia coli
cgatcctcgtcaggtgcaggtcagc

SEQ ID NO: 195888 - DNA, 25 bp, Escherichia coli
tcgtcaggtgcaggtcagcacgttg

SEQ ID NO: 195889 - DNA, 25 bp, Escherichia coli
gcaggtcagcacgttgctgtcgatt

SEQ ID NO: 195890 - DNA, 25 bp, Escherichia coli
cagcacgttgctgtcgattaagacc

SEQ ID NO: 195891 - DNA, 25 bp, Escherichia coli
gctgtcgattaagaccggagcttgt

SEQ ID NO: 195892 - DNA, 25 bp, Escherichia coli
agcttgtccggaagattgcaaatac

SEQ ID NO: 195893 - DNA, 25 bp, Escherichia coli
agattgcaaatactgcccgcaaacg

SEQ ID NO: 195894 - DNA, 25 bp, Escherichia coli
caaatactgcccgcaaacgtcgcgc

SEQ ID NO: 195895 - DNA, 25 bp, Escherichia coli
tgaacaggtgctggagtcggcgcgc

SEQ ID NO: 195896 - DNA, 25 bp, Escherichia coli
ggagtcggcgcgcaaagcgaaagcg

SEQ ID NO: 195897 - DNA, 25 bp, Escherichia coli
tggtgaaggtgaaaggcacgccgct

SEQ ID NO: 195898 - DNA, 25 bp, Escherichia coli
acgccgcttgccgataacgatgatg

SEQ ID NO: 195899 - DNA, 25 bp, Escherichia coli
gccggagttttacggcaatatcatc

SEQ ID NO: 195900 - DNA, 25 bp, Escherichia coli
ttgccgataacgatgatgtcgatgc

SEQ ID NO: 195901 - DNA, 25 bp, Escherichia coli
gttttacggcaatatcatcaccaca

SEQ ID NO: 195902 - DNA, 25 bp, Escherichia coli
acgatgatgtcgatgcctttgattt

SEQ ID NO: 195903 - DNA, 25 bp, Escherichia coli
gcaatatcatcaccacacgcactta

SEQ ID NO: 195904 - DNA, 25 bp, Escherichia coli
atcaccacacgcacttatcaggaac

SEQ ID NO: 195905 - DNA, 25 bp, Escherichia coli
acgcacttatcaggaacgcctcgat

SEQ ID NO: 195906 - DNA, 25 bp, Escherichia coli
atacgctggaaaaagtgcgcgatgc

SEQ ID NO: 195907 - DNA, 25 bp, Escherichia coli
ggaaaaagtgcgcgatgccgggatc

SEQ ID NO: 195908 - DNA, 25 bp, Escherichia coli
agtgcgcgatgccgggatcaaagtc

SEQ ID NO: 195909 - DNA, 25 bp, Escherichia coli
gccgggatcaaagtctgttctggcg

SEQ ID NO: 195910 - DNA, 25 bp, Escherichia coli
aagtctgttctggcggcattgtggg

SEQ ID NO: 195911 - DNA, 25 bp, Escherichia coli
aagatcgcgccggattattgctgca

SEQ ID NO: 195912 - DNA, 25 bp, Escherichia coli
gccggattattgctgcaactggcaa

SEQ ID NO: 195913 - DNA, 25 bp, Escherichia coli
attgctgcaactggcaaacctgccg

SEQ ID NO: 195914 - DNA, 25 bp, Escherichia coli
cgccggaaagcgtgccaatcaacat

SEQ ID NO: 195915 - DNA, 25 bp, Escherichia coli
aagcgtgccaatcaacatgctggtg

SEQ ID NO: 195916 - DNA, 25 bp, Escherichia coli
caatcaacatgctggtgaaggtgaa

SEQ ID NO: 195917 - DNA, 25 bp, Escherichia coli
atgatgcgctcagtgccatgcgttc

SEQ ID NO: 195918 - DNA, 25 bp, Escherichia coli
ctcagtgccatgcgttcgctgaaag

SEQ ID NO: 195919 - DNA, 25 bp, Escherichia coli
catgcgttcgctgaaaggcatcggt

SEQ ID NO: 195920 - DNA, 25 bp, Escherichia coli
ctgaaaggcatcggtgccacgcatc

SEQ ID NO: 195921 - DNA, 25 bp, Escherichia coli
ggcatcggtgccacgcatcttcatg

SEQ ID NO: 195922 - DNA, 25 bp, Escherichia coli
tgccacgcatcttcatgaagggcgc

SEQ ID NO: 195923 - DNA, 25 bp, Escherichia coli
atcttcatgaagggcgcgacccgcg

SEQ ID NO: 195924 - DNA, 25 bp, Escherichia coli
attaacgcgttcgcagttgcagcga

SEQ ID NO: 195925 - DNA, 25 bp, Escherichia coli
tacccgaacgtcatcaggcgtggca

SEQ ID NO: 195926 - DNA, 25 bp, Escherichia coli
gcgttcgcagttgcagcgattgcaa

SEQ ID NO: 195927 - DNA, 25 bp, Escherichia coli
ggtggacgagcgtccgcatgctaat

SEQ ID NO: 195928 - DNA, 25 bp, Escherichia coli
agttgcagcgattgcaactggcctg

SEQ ID NO: 195929 - DNA, 25 bp, Escherichia coli
cgtccgcatgctaatcgctttttac

SEQ ID NO: 195930 - DNA, 25 bp, Escherichia coli
tttaccgccagatgaaatcgaacag

SEQ ID NO: 195931 - DNA, 25 bp, Escherichia coli
gatgaaatcgaacagtcgctgaacg

SEQ ID NO: 195932 - DNA, 25 bp, Escherichia coli
aacagtcgctgaacggcgtgcatta

SEQ ID NO: 195933 - DNA, 25 bp, Escherichia coli
acatcatattcagcccatcacgctg

SEQ ID NO: 195934 - DNA, 25 bp, Escherichia coli
ttcagcccatcacgctgtggtttga

SEQ ID NO: 195935 - DNA, 25 bp, Escherichia coli
atcacgctgtggtttgatgatgcgc

SEQ ID NO: 195936 - DNA, 25 bp, Escherichia coli
ggtttgatgatgcgctcagtgccat

SEQ ID NO: 195937 - DNA, 25 bp, Escherichia coli
tgttcaggcacgccagaaggatgcc

SEQ ID NO: 195938 - DNA, 25 bp, Escherichia coli
agaaggatgccgcagaccattatct

SEQ ID NO: 195939 - DNA, 25 bp, Escherichia coli
gccgcagaccattatctggcgggag

SEQ ID NO: 195940 - DNA, 25 bp, Escherichia coli
cgttagcgactgcgacgttcgatct

SEQ ID NO: 195941 - DNA, 25 bp, Escherichia coli
cgacgttcgatcttgcatggagcaa

SEQ ID NO: 195942 - DNA, 25 bp, Escherichia coli
gatcttgcatggagcaatctcgcag

SEQ ID NO: 195943 - DNA, 25 bp, Escherichia coli
cagcggcatttggtcgggcagccgc

SEQ ID NO: 195944 - DNA, 25 bp, Escherichia coli
caatctcgcagtgcagtggtgcggt

SEQ ID NO: 195945 - DNA, 25 bp, Escherichia coli
gtcgggcagccgcacactatgagca

SEQ ID NO: 195946 - DNA, 25 bp, Escherichia coli
atttatccacggcactccgcgagct

SEQ ID NO: 195947 - DNA, 25 bp, Escherichia coli
cgcacactatgagcaacatgcagat

SEQ ID NO: 195948 - DNA, 25 bp, Escherichia coli
aacatgcagatctacagcgccagag

SEQ ID NO: 195949 - DNA, 25 bp, Escherichia coli
tacagcgccagagtgctgacgcctt

SEQ ID NO: 195950 - DNA, 25 bp, Escherichia coli
gagtgctgacgccttactggcaatg

SEQ ID NO: 195951 - DNA, 25 bp, Escherichia coli
tactggcaatgcttccacagcgtaa

SEQ ID NO: 195952 - DNA, 25 bp, Escherichia coli
gggttgtggacctggctggatgagc

SEQ ID NO: 195953 - DNA, 25 bp, Escherichia coli
tgagccgccactggcgggaacgtca

SEQ ID NO: 195954 - DNA, 25 bp, Escherichia coli
gcgcaggtgacggccttagatctct

SEQ ID NO: 195955 - DNA, 25 bp, Escherichia coli
gccttagatctctcgccgccaatgc

SEQ ID NO: 195956 - DNA, 25 bp, Escherichia coli
gccgccaatgcttgttcaggcacgc

SEQ ID NO: 195957 - DNA, 25 bp, Escherichia coli
cgtcacgctgaatatatgaccacgc

SEQ ID NO: 195958 - DNA, 25 bp, Escherichia coli
acgctgaatatatgaccacgctcac

SEQ ID NO: 195959 - DNA, 25 bp, Escherichia coli
ctgaatatatgaccacgctcacccg

SEQ ID NO: 195960 - DNA, 25 bp, Escherichia coli
gaatatatgaccacgctcacccgca

SEQ ID NO: 195961 - DNA, 25 bp, Escherichia coli
cccgcatgattcccgcgccgctgct

SEQ ID NO: 195962 - DNA, 25 bp, Escherichia coli
catgattcccgcgccgctgctggga

SEQ ID NO: 195963 - DNA, 25 bp, Escherichia coli
gattcccgcgccgctgctgggagag

SEQ ID NO: 195964 - DNA, 25 bp, Escherichia coli
cgcgccgctgctgggagagatcccc

SEQ ID NO: 195965 - DNA, 25 bp, Escherichia coli
ccgctgctgggagagatcccctggc

SEQ ID NO: 195966 - DNA, 25 bp, Escherichia coli
ctgctgggagagatcccctggcttg

SEQ ID NO: 195967 - DNA, 25 bp, Escherichia coli
gctgggagagatcccctggcttgca

SEQ ID NO: 195968 - DNA, 25 bp, Escherichia coli
ggagagatcccctggcttgcagaaa

SEQ ID NO: 195969 - DNA, 25 bp, Escherichia coli
ggtgctggcggctggtttacgccgc

SEQ ID NO: 195970 - DNA, 25 bp, Escherichia coli
gagatcccctggcttgcagaaaatc

SEQ ID NO: 195971 - DNA, 25 bp, Escherichia coli
ctttctgacactttcacttttgcag

SEQ ID NO: 195972 - DNA, 25 bp, Escherichia coli
atcccctggcttgcagaaaatccag

SEQ ID NO: 195973 - DNA, 25 bp, Escherichia coli
tgacactttcacttttgcagattgg

SEQ ID NO: 195974 - DNA, 25 bp, Escherichia coli
tttgcagattgggtaacacaggaac

SEQ ID NO: 195975 - DNA, 25 bp, Escherichia coli
gaaaacgtcacgctgaatatatgac

SEQ ID NO: 195976 - DNA, 25 bp, Escherichia coli
aaacgtcacgctgaatatatgacca

SEQ ID NO: 195977 - DNA, 25 bp, Escherichia coli
gcgctggcgttacagcgcaacagca

SEQ ID NO: 195978 - DNA, 25 bp, Escherichia coli
cgttacagcgcaacagcagcctgca

SEQ ID NO: 195979 - DNA, 25 bp, Escherichia coli
agcgcaacagcagcctgcagctgga

SEQ ID NO: 195980 - DNA, 25 bp, Escherichia coli
cagcagcctgcagctggattacgca

SEQ ID NO: 195981 - DNA, 25 bp, Escherichia coli
ctgcagctggattacgcaacagtaa

SEQ ID NO: 195982 - DNA, 25 bp, Escherichia coli
catcagcgcgcaagagggcagaccg

SEQ ID NO: 195983 - DNA, 25 bp, Escherichia coli
cgcaagagggcagaccgatagaatc

SEQ ID NO: 195984 - DNA, 25 bp, Escherichia coli
gggcagaccgatagaatcattggta

SEQ ID NO: 195985 - DNA, 25 bp, Escherichia coli
gaccgatagaatcattggtaatgag

SEQ ID NO: 195986 - DNA, 25 bp, Escherichia coli
agaatcattggtaatgagcgccgga

SEQ ID NO: 195987 - DNA, 25 bp, Escherichia coli
gggaaaactgtcgccagttgtgcac

SEQ ID NO: 195988 - DNA, 25 bp, Escherichia coli
ttggtaatgagcgccggattacgcg

SEQ ID NO: 195989 - DNA, 25 bp, Escherichia coli
cgccagttgtgcacttttacaagcc

SEQ ID NO: 195990 - DNA, 25 bp, Escherichia coli
atgagcgccggattacgcgcgcttg

SEQ ID NO: 195991 - DNA, 25 bp, Escherichia coli
cacttttacaagccgcaaaggcagc

SEQ ID NO: 195992 - DNA, 25 bp, Escherichia coli
caagccgcaaaggcagcaggctacc

SEQ ID NO: 195993 - DNA, 25 bp, Escherichia coli
gcaaaggcagcaggctaccggacgg

SEQ ID NO: 195994 - DNA, 25 bp, Escherichia coli
aggtttacgcaatagcgacgcgctg

SEQ ID NO: 195995 - DNA, 25 bp, Escherichia coli
cgcaatagcgacgcgctggcgttac

SEQ ID NO: 195996 - DNA, 25 bp, Escherichia coli
gcgacgcgctggcgttacagcgcaa

SEQ ID NO: 195997 - DNA, 25 bp, Bacteriophage P1
tggtcgagcgatggatttccgtctc

SEQ ID NO: 195998 - DNA, 25 bp, Bacteriophage P1
atggatttccgtctctggtgtagct

SEQ ID NO: 195999 - DNA, 25 bp, Bacteriophage P1
gtctctggtgtagctgatgatccga

SEQ ID NO: 196000 - DNA, 25 bp, Bacteriophage P1
tgtagctgatgatccgaataactac

SEQ ID NO: 196001 - DNA, 25 bp, Bacteriophage P1
accagccagctatcaactcgcgccc

SEQ ID NO: 196002 - DNA, 25 bp, Bacteriophage P1
gcaactcatcgattgatttacggcg

SEQ ID NO: 196003 - DNA, 25 bp, Bacteriophage P1
gattgatttacggcgctaaggatga

SEQ ID NO: 196004 - DNA, 25 bp, Bacteriophage P1
taaggatgactctggtcagagatac

SEQ ID NO: 196005 - DNA, 25 bp, Bacteriophage P1
tggtcagagatacctggcctggtct

SEQ ID NO: 196006 - DNA, 25 bp, Bacteriophage P1
ctggtctggacacagtgcccgtgtc

SEQ ID NO: 196007 - DNA, 25 bp, Bacteriophage P1
gtgcccgtgtcggagccgcgcgaga

SEQ ID NO: 196008 - DNA, 25 bp, Bacteriophage P1
cgagatatggcccgcgctggagttt

SEQ ID NO: 196009 - DNA, 25 bp, Bacteriophage P1
ggagtttcaataccggagatcatgc

SEQ ID NO: 196010 - DNA, 25 bp, Bacteriophage P1
ggagatcatgcaagctggtggctgg

SEQ ID NO: 196011 - DNA, 25 bp, Bacteriophage P1
ctggtggctggaccaatgtaaatat

SEQ ID NO: 196012 - DNA, 25 bp, Bacteriophage P1
ccaatgtaaatattgtcatgaacta

SEQ ID NO: 196013 - DNA, 25 bp, Bacteriophage P1
cgctggttagcaccgcaggtgtaga

SEQ ID NO: 196014 - DNA, 25 bp, Bacteriophage P1
ttgtcatgaactatatccgtaacct

SEQ ID NO: 196015 - DNA, 25 bp, Bacteriophage P1
caccgcaggtgtagagaaggcactt

SEQ ID NO: 196016 - DNA, 25 bp, Bacteriophage P1
tagtgaaacaggggcaatggtgcgc

SEQ ID NO: 196017 - DNA, 25 bp, Bacteriophage P1
gacatgttcagggatcgccaggcgt

SEQ ID NO: 196018 - DNA, 25 bp, Bacteriophage P1
gccaggcgttttctgagcatacctg

SEQ ID NO: 196019 - DNA, 25 bp, Bacteriophage P1
gcggcatggtgcaagttgaataacc

SEQ ID NO: 196020 - DNA, 25 bp, Bacteriophage P1
gaagatgttcgcgattatcttctat

SEQ ID NO: 196021 - DNA, 25 bp, Bacteriophage P1
tctatatcttcaggcgcgcggtctg

SEQ ID NO: 196022 - DNA, 25 bp, Bacteriophage P1
gcaacatttgggccagctaaacatg

SEQ ID NO: 196023 - DNA, 25 bp, Bacteriophage P1
ccagctaaacatgcttcatcgtcgg

SEQ ID NO: 196024 - DNA, 25 bp, Bacteriophage P1
ccgggctgccacgaccaagtgacag

SEQ ID NO: 196025 - DNA, 25 bp, Bacteriophage P1
gaccaagtgacagcaatgctgtttc

SEQ ID NO: 196026 - DNA, 25 bp, Bacteriophage P1
aatgctgtttcactggttatgcggc

SEQ ID NO: 196027 - DNA, 25 bp, Bacteriophage P1
atgccggtgaacgtgcaaaacaggc

SEQ ID NO: 196028 - DNA, 25 bp, Bacteriophage P1
acgtgcaaaacaggctctagcgttc

SEQ ID NO: 196029 - DNA, 25 bp, Bacteriophage P1
ctctagcgttcgaacgcactgattt

SEQ ID NO: 196030 - DNA, 25 bp, Bacteriophage P1
tcgttcactcatggaaaatagcgat

SEQ ID NO: 196031 - DNA, 25 bp, Bacteriophage P1
atttgcctgcattaccggtcgatgc

SEQ ID NO: 196032 - DNA, 25 bp, Bacteriophage P1
atggaaaatagcgatcgctgccagg

SEQ ID NO: 196033 - DNA, 25 bp, Bacteriophage P1
taccggtcgatgcaacgagtgatga

SEQ ID NO: 196034 - DNA, 25 bp, Bacteriophage P1
tcagggttaaagatatctcacgtac

SEQ ID NO: 196035 - DNA, 25 bp, Bacteriophage P1
gagtgatgaggttcgcaagaacctg

SEQ ID NO: 196036 - DNA, 25 bp, Bacteriophage P1
gcaagaacctgatggacatgttcag

SEQ ID NO: 196037 - DNA, 25 bp, Bacillus subtilis
aggatcgccatccggatcacggcaa

SEQ ID NO: 196038 - DNA, 25 bp, Bacillus subtilis
tgatcaggcaattcggtcaattgtc

SEQ ID NO: 196039 - DNA, 25 bp, Bacillus subtilis
ttgatatctcggatacaatagaggc

SEQ ID NO: 196040 - DNA, 25 bp, Bacillus subtilis
ctactcctctgacgaatgggtatat

SEQ ID NO: 196041 - DNA, 25 bp, Bacillus subtilis
ggcaatgcggctgcactggtggaag

SEQ ID NO: 196042 - DNA, 25 bp, Bacillus subtilis
gccttccggcgcataaagtcagcaa

SEQ ID NO: 196043 - DNA, 25 bp, Bacillus subtilis
gaagcagctgaagcagcccgcatat

SEQ ID NO: 196044 - DNA, 25 bp, Bacillus subtilis
aatgagtgatcaggcaattcggtca

SEQ ID NO: 196045 - DNA, 25 bp, Bacillus subtilis
aagaattcagctaacgcttccagac

SEQ ID NO: 196046 - DNA, 25 bp, Bacillus subtilis
attcggtcaattgtcactgtcatca

SEQ ID NO: 196047 - DNA, 25 bp, Bacillus subtilis
gtcactgtcatcagaatctgtcggc

SEQ ID NO: 196048 - DNA, 25 bp, Bacillus subtilis
gataaatggttttcatcagccggat

SEQ ID NO: 196049 - DNA, 25 bp, Bacillus subtilis
tccggatcacggcaatgcggctgca

SEQ ID NO: 196050 - DNA, 25 bp, Bacillus subtilis
agaagaagcagctgaagcagcccgc

SEQ ID NO: 196051 - DNA, 25 bp, Bacillus subtilis
gctgaagcagcccgcatattaggcg

SEQ ID NO: 196052 - DNA, 25 bp, Bacillus subtilis
gcagcccgcatattaggcgcagata

SEQ ID NO: 196053 - DNA, 25 bp, Bacillus subtilis
ttttgttattgatatctcggataca

SEQ ID NO: 196054 - DNA, 25 bp, Bacillus subtilis
tcaattgtcactgtcatcagaatct

SEQ ID NO: 196055 - DNA, 25 bp, Bacillus subtilis
ggtatattgaaatcgttgaagcgag

SEQ ID NO: 196056 - DNA, 25 bp, Bacillus subtilis
catcagaatctgtcggccaaaagcg

SEQ ID NO: 196057 - DNA, 25 bp, Bacillus subtilis
agcagcaaggacatccggatgaaaa

SEQ ID NO: 196058 - DNA, 25 bp, Bacillus subtilis
gagattattgagcttcatcatgacc

SEQ ID NO: 196059 - DNA, 25 bp, Bacillus subtilis
agggatcggagccatcatcgcgcca

SEQ ID NO: 196060 - DNA, 25 bp, Bacillus subtilis
gaagcttgacgcaccaagcggaact

SEQ ID NO: 196061 - DNA, 25 bp, Bacillus subtilis
gatatccatgcctgttttacagaaa

SEQ ID NO: 196062 - DNA, 25 bp, Bacillus subtilis
agcttcatcatgaccagaagcttga

SEQ ID NO: 196063 - DNA, 25 bp, Bacillus subtilis
tacacagatatccatgcctgtttta

SEQ ID NO: 196064 - DNA, 25 bp, Bacillus subtilis
tcatcgcgccaaattttgcgctcgg

SEQ ID NO: 196065 - DNA, 25 bp, Bacillus subtilis
catgaccagaagcttgacgcaccaa

SEQ ID NO: 196066 - DNA, 25 bp, Bacillus subtilis
cgctcggtgcgatactgatgatgaa

SEQ ID NO: 196067 - DNA, 25 bp, Bacillus subtilis
tggcagaacgaacaccacattttga

SEQ ID NO: 196068 - DNA, 25 bp, Bacillus subtilis
ttgagtcagatgctttcatttacac

SEQ ID NO: 196069 - DNA, 25 bp, Bacillus subtilis
aaattttgcgctcggtgcgatactg

SEQ ID NO: 196070 - DNA, 25 bp, Bacillus subtilis
caagcggaactgcgcttaaaacagc

SEQ ID NO: 196071 - DNA, 25 bp, Bacillus subtilis
tatctgatgtgatgcctgttgagtc

SEQ ID NO: 196072 - DNA, 25 bp, Bacillus subtilis
gtgatgcctgttgagtcagatgctt

SEQ ID NO: 196073 - DNA, 25 bp, Bacillus subtilis
aaaaattgcattagagcacggagtc

SEQ ID NO: 196074 - DNA, 25 bp, Bacillus subtilis
gagccatcatcgcgccaaattttgc

SEQ ID NO: 196075 - DNA, 25 bp, Bacillus subtilis
tgctttcatttacacagatatccat

SEQ ID NO: 196076 - DNA, 25 bp, Bacillus subtilis
tgccaactattttgaggatgttgag

SEQ ID NO: 196077 - DNA, 25 bp, Bacillus subtilis
atgaagattgatcagcttgtgtatg

SEQ ID NO: 196078 - DNA, 25 bp, Bacillus subtilis
aggatatggttcaatttacgactgc

SEQ ID NO: 196079 - DNA, 25 bp, Bacillus subtilis
catgtcaggcgttaaactgtcagtc

SEQ ID NO: 196080 - DNA, 25 bp, Bacillus subtilis
tcatgatctatacgcaaccggaacc

SEQ ID NO: 196081 - DNA, 25 bp, Bacillus subtilis
cattaatccgtttatgtgatgtgta

SEQ ID NO: 196082 - DNA, 25 bp, Bacillus subtilis
tgcactgatcgctgccaatgcactc

SEQ ID NO: 196083 - DNA, 25 bp, Bacillus subtilis
atgctgacgttcttgcttttggcgc

SEQ ID NO: 196084 - DNA, 25 bp, Bacillus subtilis
aaattcttgtgcgcacacttgatga

SEQ ID NO: 196085 - DNA, 25 bp, Bacillus subtilis
gatgtctcggcattaatccgtttat

SEQ ID NO: 196086 - DNA, 25 bp, Bacillus subtilis
cacagtgatgatgtcgagatcggaa

SEQ ID NO: 196087 - DNA, 25 bp, Bacillus subtilis
ttcatgaggcgacaggtcttcaaat

SEQ ID NO: 196088 - DNA, 25 bp, Bacillus subtilis
gctgccaatgcactcgatcttgtca

SEQ ID NO: 196089 - DNA, 25 bp, Bacillus subtilis
tgaaaattgctttgatcgcgcatga

SEQ ID NO: 196090 - DNA, 25 bp, Bacillus subtilis
gcttttggcgcccacagtgatgatg

SEQ ID NO: 196091 - DNA, 25 bp, Bacillus subtilis
tgatgtgtattccattccgctcgcc

SEQ ID NO: 196092 - DNA, 25 bp, Bacillus subtilis
cccgctgaccgcgcagccgcatgaa

SEQ ID NO: 196093 - DNA, 25 bp, Bacillus subtilis
agcaaatcggtgcactgatcgctgc

SEQ ID NO: 196094 - DNA, 25 bp, Bacillus subtilis
gcgcacacttgatgaaggtgttttc

SEQ ID NO: 196095 - DNA, 25 bp, Bacillus subtilis
gctcgccacaaatatgggtactgcg

SEQ ID NO: 196096 - DNA, 25 bp, Bacillus subtilis
tcaatttacgactgcctatcgggat

SEQ ID NO: 196097 - DNA, 25 bp, Bacillus subtilis
attcatattcatttgtatccaaggt

SEQ ID NO: 196098 - DNA, 25 bp, Bacillus subtilis
tacaatcgtttcatcattcggcgtg

SEQ ID NO: 196099 - DNA, 25 bp, Bacillus subtilis
tattcgttatacggaagatgatgaa

SEQ ID NO: 196100 - DNA, 25 bp, Bacillus subtilis
agctgtacaatcgtttcatcattcg

SEQ ID NO: 196101 - DNA, 25 bp, Bacillus subtilis
tggagagattcatattcatttgtat

SEQ ID NO: 196102 - DNA, 25 bp, Bacillus subtilis
catattcatttgtatccaaggtgct

SEQ ID NO: 196103 - DNA, 25 bp, Bacillus subtilis
tttgtatccaaggtgctgaatcttg

SEQ ID NO: 196104 - DNA, 25 bp, Bacillus subtilis
gcacaactctttatacggttggctc

SEQ ID NO: 196105 - DNA, 25 bp, Bacillus subtilis
atgatgaaccgcttcatgccactga

SEQ ID NO: 196106 - DNA, 25 bp, Bacillus subtilis
ctgtacaatcgtttcatcattcggc

SEQ ID NO: 196107 - DNA, 25 bp, Bacillus subtilis
tatccaaggtgctgaatcttggagg

SEQ ID NO: 196108 - DNA, 25 bp, Bacillus subtilis
gagacgcaggcacaactctttatac

SEQ ID NO: 196109 - DNA, 25 bp, Bacillus subtilis
aagatgatgaaccgcttcatgccac

SEQ ID NO: 196110 - DNA, 25 bp, Bacillus subtilis
aatcgtttcatcattcggcgtgcga

SEQ ID NO: 196111 - DNA, 25 bp, Bacillus subtilis
ataagctgtacaatcgtttcatcat

SEQ ID NO: 196112 - DNA, 25 bp, Bacillus subtilis
accgcttcatgccactgaatacgtt

SEQ ID NO: 196113 - DNA, 25 bp, Bacillus subtilis
tgggagacgcaggcacaactcttta

SEQ ID NO: 196114 - DNA, 25 bp, Bacillus subtilis
catttgtatccaaggtgctgaatct

SEQ ID NO: 196115 - DNA, 25 bp, Bacillus subtilis
cgtttcatcattcggcgtgcgaatt

SEQ ID NO: 196116 - DNA, 25 bp, Bacillus subtilis
tgaaccgcttcatgccactgaatac

SEQ ID NO: 196117 - DNA, 25 bp, Bacillus subtilis
ggcatatgcgagcaaagcattctca

SEQ ID NO: 196118 - DNA, 25 bp, Bacillus subtilis
aggtgtggatgctctctatttagcg

SEQ ID NO: 196119 - DNA, 25 bp, Bacillus subtilis
tggatgctctctatttagcggagaa

SEQ ID NO: 196120 - DNA, 25 bp, Bacillus subtilis
gggctgaaagcacaggtggcatatg

SEQ ID NO: 196121 - DNA, 25 bp, Bacillus subtilis
cacctctttacgtatatgatgtggc

SEQ ID NO: 196122 - DNA, 25 bp, Bacillus subtilis
gcaggcgtttatttctgcagggctg

SEQ ID NO: 196123 - DNA, 25 bp, Bacillus subtilis
tggtacacctctttacgtatatgat

SEQ ID NO: 196124 - DNA, 25 bp, Bacillus subtilis
gcagacaaaatcaacatggtcattt

SEQ ID NO: 196125 - DNA, 25 bp, Bacillus subtilis
cattctcatcagtcgcaatgattca

SEQ ID NO: 196126 - DNA, 25 bp, Bacillus subtilis
tctttagatgtcgtatccggaggag

SEQ ID NO: 196127 - DNA, 25 bp, Bacillus subtilis
gtatatgatgtggctttaatacgtg

SEQ ID NO: 196128 - DNA, 25 bp, Bacillus subtilis
gcaaagcattctcatcagtcgcaat

SEQ ID NO: 196129 - DNA, 25 bp, Bacillus subtilis
atgtcgtatccggaggagagctata

SEQ ID NO: 196130 - DNA, 25 bp, Bacillus subtilis
atgcgagcaaagcattctcatcagt

SEQ ID NO: 196131 - DNA, 25 bp, Bacillus subtilis
ggagagctatatacggctgttgcag

SEQ ID NO: 196132 - DNA, 25 bp, Bacillus subtilis
catcagtcgcaatgattcagctcgc

SEQ ID NO: 196133 - DNA, 25 bp, Bacillus subtilis
tttatttctgcagggctgaaagcac

SEQ ID NO: 196134 - DNA, 25 bp, Bacillus subtilis
tcgcaatgattcagctcgctgagga

SEQ ID NO: 196135 - DNA, 25 bp, Bacillus subtilis
tagaaatcggaggtgtggatgctct

SEQ ID NO: 196136 - DNA, 25 bp, Bacillus subtilis
tttaagcaggcgtttatttctgcag

SEQ ID NO: 196137 - DNA, 25 bp, Bacillus subtilis
tagaagcgcatacgcatgactacat

SEQ ID NO: 196138 - DNA, 25 bp, Bacillus subtilis
aacacattcagctgctgggtgtcca

SEQ ID NO: 196139 - DNA, 25 bp, Bacillus subtilis
ggataatttctatgaaatcgcgctt

SEQ ID NO: 196140 - DNA, 25 bp, Bacillus subtilis
gtcactccatcgatgttcttcttcg

SEQ ID NO: 196141 - DNA, 25 bp, Bacillus subtilis
agctgctgggtgtccattgccatat

SEQ ID NO: 196142 - DNA, 25 bp, Bacillus subtilis
atacgcatgactacattacaacggg

SEQ ID NO: 196143 - DNA, 25 bp, Bacillus subtilis
cgcttgagcaccgcatcggctgcat

SEQ ID NO: 196144 - DNA, 25 bp, Bacillus subtilis
agcgcatacgcatgactacattaca

SEQ ID NO: 196145 - DNA, 25 bp, Bacillus subtilis
cattcagctgctgggtgtccattgc

SEQ ID NO: 196146 - DNA, 25 bp, Bacillus subtilis
gcaccgcatcggctgcattgtggtg

SEQ ID NO: 196147 - DNA, 25 bp, Bacillus subtilis
aatcgcgcttcttgaagacctatgt

SEQ ID NO: 196148 - DNA, 25 bp, Bacillus subtilis
gcatcggctgcattgtggtggataa

SEQ ID NO: 196149 - DNA, 25 bp, Bacillus subtilis
aatcggaacacattcagctgctggg

SEQ ID NO: 196150 - DNA, 25 bp, Bacillus subtilis
gatggcgcttgagcaccgcatcggc

SEQ ID NO: 196151 - DNA, 25 bp, Bacillus subtilis
atttctatgaaatcgcgcttcttga

SEQ ID NO: 196152 - DNA, 25 bp, Bacillus subtilis
gatcacgcccggagtagaagcgcat

SEQ ID NO: 196153 - DNA, 25 bp, Bacillus subtilis
tcgatcttcataacggacaaactga

SEQ ID NO: 196154 - DNA, 25 bp, Bacillus subtilis
ttcggatcacgcccggagtagaagc

SEQ ID NO: 196155 - DNA, 25 bp, Bacillus subtilis
attacaatcggaacacattcagctg

SEQ ID NO: 196156 - DNA, 25 bp, Bacillus subtilis
ctatgaaatcgcgcttcttgaagac

SEQ ID NO: 196157 - DNA, 25 bp, Bacillus subtilis
ccatcccgagctgaatatcggggtc

SEQ ID NO: 196158 - DNA, 25 bp, Bacillus subtilis
agtgaggcttctgggtgcataccag

SEQ ID NO: 196159 - DNA, 25 bp, Bacillus subtilis
ctgcatagagtgctgtctgcatttt

SEQ ID NO: 196160 - DNA, 25 bp, Bacillus subtilis
gccaatgatatggcagcttctacat

SEQ ID NO: 196161 - DNA, 25 bp, Bacillus subtilis
gaattcaaaattgagctctaggccc

SEQ ID NO: 196162 - DNA, 25 bp, Bacillus subtilis
gtattgattccaggggccatgcagg

SEQ ID NO: 196163 - DNA, 25 bp, Bacillus subtilis
gagctgaatatcggggtcattgcca

SEQ ID NO: 196164 - DNA, 25 bp, Bacillus subtilis
ttaatggtcatgctgccgcaggatg

SEQ ID NO: 196165 - DNA, 25 bp, Bacillus subtilis
aggggccatgcaggagcttgaagca

SEQ ID NO: 196166 - DNA, 25 bp, Bacillus subtilis
tatcggggtcattgccaatgatatg

SEQ ID NO: 196167 - DNA, 25 bp, Bacillus subtilis
ctgtctcccgatgaaaacatatctt

SEQ ID NO: 196168 - DNA, 25 bp, Bacillus subtilis
atggcagcttctacatacgaattaa

SEQ ID NO: 196169 - DNA, 25 bp, Bacillus subtilis
cttctgggtgcataccagtcttacc

SEQ ID NO: 196170 - DNA, 25 bp, Bacillus subtilis
tgatgatgtattgattccaggggcc

SEQ ID NO: 196171 - DNA, 25 bp, Bacillus subtilis
catgctgccgcaggatgatcagtcc

SEQ ID NO: 196172 - DNA, 25 bp, Bacillus subtilis
gtcagtgaccatcccgagctgaata

SEQ ID NO: 196173 - DNA, 25 bp, Bacillus subtilis
cggggcgctgcatagagtgctgtct

SEQ ID NO: 196174 - DNA, 25 bp, Bacillus subtilis
ggatgatcagtccggggcgctgcat

SEQ ID NO: 196175 - DNA, 25 bp, Bacillus subtilis
gtgctgtctgcattttcttggagaa

SEQ ID NO: 196176 - DNA, 25 bp, Bacillus subtilis
aagtttgtcagtgaccatcccgagc

SEQ ID NO: 196177 - DNA, 25 bp, Bacillus subtilis
cagtagcagatgccgttcaaaaggt

SEQ ID NO: 196178 - DNA, 25 bp, Bacillus subtilis
tctttccattcaccagaccattccg

SEQ ID NO: 196179 - DNA, 25 bp, Bacillus subtilis
atcttgtccgtgaagatgtattgcc

SEQ ID NO: 196180 - DNA, 25 bp, Bacillus subtilis
ctgattctggaagcaacgttctttc

SEQ ID NO: 196181 - DNA, 25 bp, Bacillus subtilis
gcaaatgtgacactgtctatcagta

SEQ ID NO: 196182 - DNA, 25 bp, Bacillus subtilis
tacagggatgctgtttttccattct

SEQ ID NO: 196183 - DNA, 25 bp, Bacillus subtilis
accagaccattccgcttcaaggcag

SEQ ID NO: 196184 - DNA, 25 bp, Bacillus subtilis
gacattttatcttgtccgtgaagat

SEQ ID NO: 196185 - DNA, 25 bp, Bacillus subtilis
cgcttcaaggcagagcaaatgtgac

SEQ ID NO: 196186 - DNA, 25 bp, Bacillus subtilis
gcgttatctcagcttcttcaggcgg

SEQ ID NO: 196187 - DNA, 25 bp, Bacillus subtilis
ggcggtagctgattctggaagcaac

SEQ ID NO: 196188 - DNA, 25 bp, Bacillus subtilis
ctcagcttcttcaggcggtagctga

SEQ ID NO: 196189 - DNA, 25 bp, Bacillus subtilis
taggtcaggtgcgttatctcagctt

SEQ ID NO: 196190 - DNA, 25 bp, Bacillus subtilis
tcttcaggcggtagctgattctgga

SEQ ID NO: 196191 - DNA, 25 bp, Bacillus subtilis
cactgtctatcagtacgtcggcaat

SEQ ID NO: 196192 - DNA, 25 bp, Bacillus subtilis
gtattgcccgatgcaatgagaaaaa

SEQ ID NO: 196193 - DNA, 25 bp, Bacillus subtilis
aagatgtattgcccgatgcaatgag

SEQ ID NO: 196194 - DNA, 25 bp, Bacillus subtilis
ccattccgcttcaaggcagagcaaa

SEQ ID NO: 196195 - DNA, 25 bp, Bacillus subtilis
agcagattcagtagcagatgccgtt

SEQ ID NO: 196196 - DNA, 25 bp, Bacillus subtilis
ggaggataggtcaggtgcgttatct

SEQ ID NO: 196197 - DNA, 25 bp, Bacillus subtilis
gtgtatagatgcagccgttgcaggc

SEQ ID NO: 196198 - DNA, 25 bp, Bacillus subtilis
aggtccagcagctacatttacacat

SEQ ID NO: 196199 - DNA, 25 bp, Bacillus subtilis
ctatttaatacatgaacagcctttg

SEQ ID NO: 196200 - DNA, 25 bp, Bacillus subtilis
tcaaaacggcgccgaacatgttgct

SEQ ID NO: 196201 - DNA, 25 bp, Bacillus subtilis
gaaatattaggttcaggtgcataag

SEQ ID NO: 196202 - DNA, 25 bp, Bacillus subtilis
ccgcaccattccggagtgtatagat

SEQ ID NO: 196203 - DNA, 25 bp, Bacillus subtilis
cgaacatgttgcttaccgcaccatt

SEQ ID NO: 196204 - DNA, 25 bp, Bacillus subtilis
gggtgaaatgacgttgccgattcac

SEQ ID NO: 196205 - DNA, 25 bp, Bacillus subtilis
tacacatctagcagtcagttcttgt

SEQ ID NO: 196206 - DNA, 25 bp, Bacillus subtilis
ttatttaggtccagcagctacattt

SEQ ID NO: 196207 - DNA, 25 bp, Bacillus subtilis
gctacatttacacatctagcagtca

SEQ ID NO: 196208 - DNA, 25 bp, Bacillus subtilis
gagctcgacaaaatttactcacatt

SEQ ID NO: 196209 - DNA, 25 bp, Bacillus subtilis
aatttactcacattcacacgcgatt

SEQ ID NO: 196210 - DNA, 25 bp, Bacillus subtilis
attgcgcaatgccataaatttcttc

SEQ ID NO: 196211 - DNA, 25 bp, Bacillus subtilis
gatgcagccgttgcaggcgaagttg

SEQ ID NO: 196212 - DNA, 25 bp, Bacillus subtilis
cacttgctcgtccatccctcaagag

SEQ ID NO: 196213 - DNA, 25 bp, Bacillus subtilis
gacgttgccgattcaccagcacttg

SEQ ID NO: 196214 - DNA, 25 bp, Bacillus subtilis
tcacattcacacgcgattgcgcaat

SEQ ID NO: 196215 - DNA, 25 bp, Bacillus subtilis
catgaacagcctttgccaatcgtgg

SEQ ID NO: 196216 - DNA, 25 bp, Bacillus subtilis
acacgcgattgcgcaatgccataaa

SEQ ID NO: 196217 - DNA, 25 bp, Bacillus subtilis
ccaaatgatccgcgtcccgaatgct

SEQ ID NO: 196218 - DNA, 25 bp, Bacillus subtilis
catgtccaaggattggccgcttgtc

SEQ ID NO: 196219 - DNA, 25 bp, Bacillus subtilis
cccgaatgctgacattgacgtagtc

SEQ ID NO: 196220 - DNA, 25 bp, Bacillus subtilis
gttccatcagccgtaccgggcgatg

SEQ ID NO: 196221 - DNA, 25 bp, Bacillus subtilis
tgctgtcagcaatatcctcattgct

SEQ ID NO: 196222 - DNA, 25 bp, Bacillus subtilis
tgaagtgctgacaagagacgcgaga

SEQ ID NO: 196223 - DNA, 25 bp, Bacillus subtilis
gctcgcgcttcatttccctcattgt

SEQ ID NO: 196224 - DNA, 25 bp, Bacillus subtilis
cggagcaggcccaacgattctcgtc

SEQ ID NO: 196225 - DNA, 25 bp, Bacillus subtilis
agacgcgagagacgtgcttccgaag

SEQ ID NO: 196226 - DNA, 25 bp, Bacillus subtilis
tgccgatgccgtaaaagcaagtgct

SEQ ID NO: 196227 - DNA, 25 bp, Bacillus subtilis
gaaggagtttccatatgccgatgcc

SEQ ID NO: 196228 - DNA, 25 bp, Bacillus subtilis
cgcttctctcgtcggcggacttgtg

SEQ ID NO: 196229 - DNA, 25 bp, Bacillus subtilis
gtaccgggcgatgcttgtgcctgag

SEQ ID NO: 196230 - DNA, 25 bp, Bacillus subtilis
agaaggacacccggacaatgctggc

SEQ ID NO: 196231 - DNA, 25 bp, Bacillus subtilis
agtagagcacgtcgccgagatgaag

SEQ ID NO: 196232 - DNA, 25 bp, Bacillus subtilis
cctcattgctgcgatcatgtccaag

SEQ ID NO: 196233 - DNA, 25 bp, Bacillus subtilis
atatggaacggctctcagcggagca

SEQ ID NO: 196234 - DNA, 25 bp, Bacillus subtilis
cggcggacttgtgatcggcctgcat

SEQ ID NO: 196235 - DNA, 25 bp, Bacillus subtilis
tgtcattcctttttatgaagtgctg

SEQ ID NO: 196236 - DNA, 25 bp, Bacillus subtilis
cggcctgcatgaggatgacgagacc

SEQ ID NO: 196237 - DNA, 25 bp, Bacillus subtilis
acacctcttattcacctgccgaagc

SEQ ID NO: 196238 - DNA, 25 bp, Bacillus subtilis
gggatcatttaaagatcgcggaatg

SEQ ID NO: 196239 - DNA, 25 bp, Bacillus subtilis
gctggaaacatcactgcgtactgga

SEQ ID NO: 196240 - DNA, 25 bp, Bacillus subtilis
cagcccgtgctaacatgaaatgcat

SEQ ID NO: 196241 - DNA, 25 bp, Bacillus subtilis
gcgtcaacaggtaacacttccgctg

SEQ ID NO: 196242 - DNA, 25 bp, Bacillus subtilis
tgcattgtcatcatcccgaacggaa

SEQ ID NO: 196243 - DNA, 25 bp, Bacillus subtilis
ggaaaactcgctcaagctgtcatgt

SEQ ID NO: 196244 - DNA, 25 bp, Bacillus subtilis
gcggcggcaatcgtgcgcaatgaag

SEQ ID NO: 196245 - DNA, 25 bp, Bacillus subtilis
gaattgagcttcatgtcaaaacgga

SEQ ID NO: 196246 - DNA, 25 bp, Bacillus subtilis
acacgattatgtgcgcgtcaacagg

SEQ ID NO: 196247 - DNA, 25 bp, Bacillus subtilis
cacttccgctgctgcggcagcatat

SEQ ID NO: 196248 - DNA, 25 bp, Bacillus subtilis
gaaggcaatgacacgattatgtgcg

SEQ ID NO: 196249 - DNA, 25 bp, Bacillus subtilis
tgtgagaaatcaccgattgcccttg

SEQ ID NO: 196250 - DNA, 25 bp, Bacillus subtilis
catgagaaaaacggcacaggccttc

SEQ ID NO: 196251 - DNA, 25 bp, Bacillus subtilis
ctgtaacagatcaaacaccggcgct

SEQ ID NO: 196252 - DNA, 25 bp, Bacillus subtilis
gtccgttccatctgtgagaaatcac

SEQ ID NO: 196253 - DNA, 25 bp, Bacillus subtilis
ctgctgccttcgaagtgtgcgaaca

SEQ ID NO: 196254 - DNA, 25 bp, Bacillus subtilis
cggcagcatatgcagcccgtgctaa

SEQ ID NO: 196255 - DNA, 25 bp, Bacillus subtilis
tcagtcaacccttaccgcattgaag

SEQ ID NO: 196256 - DNA, 25 bp, Bacillus subtilis
gcaatcgtgcgcaatgaagtgattg

SEQ ID NO: 196257 - DNA, 25 bp, Bacillus subtilis
tatcagctgatcgcccgtgtagaag

SEQ ID NO: 196258 - DNA, 25 bp, Bacillus subtilis
actgatgatgaaatccttcacgcat

SEQ ID NO: 196259 - DNA, 25 bp, Bacillus subtilis
gtaaaggcagccgaggaatccaatg

SEQ ID NO: 196260 - DNA, 25 bp, Bacillus subtilis
tgcgcgtctatcgcaggagtgctga

SEQ ID NO: 196261 - DNA, 25 bp, Bacillus subtilis
gcggtcgacatttcagaaatcaagc

SEQ ID NO: 196262 - DNA, 25 bp, Bacillus subtilis
acgaagccgacatgctgttctctgt

SEQ ID NO: 196263 - DNA, 25 bp, Bacillus subtilis
tgaccgtctttgaaagcgacaaatg

SEQ ID NO: 196264 - DNA, 25 bp, Bacillus subtilis
cagataacctgatctaccaagtggc

SEQ ID NO: 196265 - DNA, 25 bp, Bacillus subtilis
gctttgattcagtcggaatggcgct

SEQ ID NO: 196266 - DNA, 25 bp, Bacillus subtilis
cctgtcacattgccgactgatgaag

SEQ ID NO: 196267 - DNA, 25 bp, Bacillus subtilis
atccttcacgcatatcagctgatcg

SEQ ID NO: 196268 - DNA, 25 bp, Bacillus subtilis
tgctgttctctgtcactgttcccgg

SEQ ID NO: 196269 - DNA, 25 bp, Bacillus subtilis
tcggaatggcgctcagcagatattt

SEQ ID NO: 196270 - DNA, 25 bp, Bacillus subtilis
aaggcagcaaggtcgtagctgtgtt

SEQ ID NO: 196271 - DNA, 25 bp, Bacillus subtilis
aagatccgaacacagcggtcgacat

SEQ ID NO: 196272 - DNA, 25 bp, Bacillus subtilis
cagatatttgaagctgaccgtcttt

SEQ ID NO: 196273 - DNA, 25 bp, Bacillus subtilis
tcagaaatcaagcctgtcacattgc

SEQ ID NO: 196274 - DNA, 25 bp, Bacillus subtilis
ctcctgtccatgtgaaggtgtggag

SEQ ID NO: 196275 - DNA, 25 bp, Bacillus subtilis
cagaaccaggttcttgcgcgtctat

SEQ ID NO: 196276 - DNA, 25 bp, Bacillus subtilis
gacagcatccttgaatatgtaaaag

SEQ ID NO: 196277 - DNA, 25 bp, Bacillus subtilis
tgggaatgtgtgccggaatatcagc

SEQ ID NO: 196278 - DNA, 25 bp, Bacillus subtilis
tctcagcgtaaagcaatccatgctt

SEQ ID NO: 196279 - DNA, 25 bp, Bacillus subtilis
ctcgacgtcattcagcttcacggtg

SEQ ID NO: 196280 - DNA, 25 bp, Bacillus subtilis
gcgagctgtacttatcggtgaatca

SEQ ID NO: 196281 - DNA, 25 bp, Bacillus subtilis
acgatgtcacgtattgccaagagct

SEQ ID NO: 196282 - DNA, 25 bp, Bacillus subtilis
agctgacaggctgtgaaatatggaa

SEQ ID NO: 196283 - DNA, 25 bp, Bacillus subtilis
ttaacatttgtcaatgaacatgggg

SEQ ID NO: 196284 - DNA, 25 bp, Bacillus subtilis
atgttgacggctttgtgattgattc

SEQ ID NO: 196285 - DNA, 25 bp, Bacillus subtilis
ggatgctgctgctcttcgcaagctg

SEQ ID NO: 196286 - DNA, 25 bp, Bacillus subtilis
atcaatagagacgatgtcacgtatt

SEQ ID NO: 196287 - DNA, 25 bp, Bacillus subtilis
atgagacaaacttctcagcgtaaag

SEQ ID NO: 196288 - DNA, 25 bp, Bacillus subtilis
gcgcttcaccatcaagataacacaa

SEQ ID NO: 196289 - DNA, 25 bp, Bacillus subtilis
gtattgccaagagcttgaagctcga

SEQ ID NO: 196290 - DNA, 25 bp, Bacillus subtilis
tttgcagcttgcggcggaatcacag

SEQ ID NO: 196291 - DNA, 25 bp, Bacillus subtilis
gtcactaaaggatttgcagcttgcg

SEQ ID NO: 196292 - DNA, 25 bp, Bacillus subtilis
gagcttgaagctcgacgtcattcag

SEQ ID NO: 196293 - DNA, 25 bp, Bacillus subtilis
gcggcggaatcacaggctgattacc

SEQ ID NO: 196294 - DNA, 25 bp, Bacillus subtilis
tgccggaatatcagcaggcggctat

SEQ ID NO: 196295 - DNA, 25 bp, Bacillus subtilis
ttcagcttcacggtgatgaaaaacc

SEQ ID NO: 196296 - DNA, 25 bp, Bacillus subtilis
ttgattcatctgtaaaagggtctag

SEQ ID NO: 196297 - DNA, 25 bp, Bacillus subtilis
gaaaacgattcatattgcagaagac

SEQ ID NO: 196298 - DNA, 25 bp, Bacillus subtilis
gatattgtcaattcttgctcatcgg

SEQ ID NO: 196299 - DNA, 25 bp, Bacillus subtilis
acacgctcttacagtcgatggactt

SEQ ID NO: 196300 - DNA, 25 bp, Bacillus subtilis
tatgatgatggcagcggaaatgact

SEQ ID NO: 196301 - DNA, 25 bp, Bacillus subtilis
tactgccggtgaggctgaaacgctg

SEQ ID NO: 196302 - DNA, 25 bp, Bacillus subtilis
gttttgtgaaggcaatgcgggcaca

SEQ ID NO: 196303 - DNA, 25 bp, Bacillus subtilis
gattcgcacgatgagtgtaaagaac

SEQ ID NO: 196304 - DNA, 25 bp, Bacillus subtilis
ctgatgaacagatttctacaattgt

SEQ ID NO: 196305 - DNA, 25 bp, Bacillus subtilis
gttgcctcggcagctggtgcgaaaa

SEQ ID NO: 196306 - DNA, 25 bp, Bacillus subtilis
cttgtattacgattcgcacgatgag

SEQ ID NO: 196307 - DNA, 25 bp, Bacillus subtilis
caatgcgggcacacgctcttacagt

SEQ ID NO: 196308 - DNA, 25 bp, Bacillus subtilis
cggtgttgcatcgatacaggcaggt

SEQ ID NO: 196309 - DNA, 25 bp, Bacillus subtilis
tacaggcaggtgctggcattgttgc

SEQ ID NO: 196310 - DNA, 25 bp, Bacillus subtilis
ctcggcaattgttgcctcggcagct

SEQ ID NO: 196311 - DNA, 25 bp, Bacillus subtilis
aagccggtgcgctgctgaaaacgat

SEQ ID NO: 196312 - DNA, 25 bp, Bacillus subtilis
tggacttcctgatattgttgataca

SEQ ID NO: 196313 - DNA, 25 bp, Bacillus subtilis
caatcgctctgtctcttctaaaagc

SEQ ID NO: 196314 - DNA, 25 bp, Bacillus subtilis
tatctcaacggcctcggcaattgtt

SEQ ID NO: 196315 - DNA, 25 bp, Bacillus subtilis
cgctaagcatggcaatcgctctgtc

SEQ ID NO: 196316 - DNA, 25 bp, Bacillus subtilis
cattgttgctgattctgttccggaa

SEQ ID NO: 196317 - DNA, 25 bp, Bacillus subtilis
gcagattgcaatagactatgaggct

SEQ ID NO: 196318 - DNA, 25 bp, Bacillus subtilis
ccgcgcagcttgaacgactaaagca

SEQ ID NO: 196319 - DNA, 25 bp, Bacillus subtilis
caccgaaagagagcgcctatctcat

SEQ ID NO: 196320 - DNA, 25 bp, Bacillus subtilis
gcagcttgaacgactaaagcagaaa

SEQ ID NO: 196321 - DNA, 25 bp, Bacillus subtilis
gatttcggtttcacaaatggcagac

SEQ ID NO: 196322 - DNA, 25 bp, Bacillus subtilis
atagactatgaggctgcgaaggcag

SEQ ID NO: 196323 - DNA, 25 bp, Bacillus subtilis
gcttttaatgcgggagctgcgattt

SEQ ID NO: 196324 - DNA, 25 bp, Bacillus subtilis
gagcgcctatctcattcagaatatt

SEQ ID NO: 196325 - DNA, 25 bp, Bacillus subtilis
aagagagcgcctatctcattcagaa

SEQ ID NO: 196326 - DNA, 25 bp, Bacillus subtilis
agacgattacaagcggaggcgctgc

SEQ ID NO: 196327 - DNA, 25 bp, Bacillus subtilis
ttttgtgcctgtgcagattgcaata

SEQ ID NO: 196328 - DNA, 25 bp, Bacillus subtilis
gattacaagcggaggcgctgccgcg

SEQ ID NO: 196329 - DNA, 25 bp, Bacillus subtilis
actatgaggctgcgaaggcagatgc

SEQ ID NO: 196330 - DNA, 25 bp, Bacillus subtilis
gaggcgctggcaagcccgaatcggt

SEQ ID NO: 196331 - DNA, 25 bp, Bacillus subtilis
gagcagcctttcgagaaacgttcat

SEQ ID NO: 196332 - DNA, 25 bp, Bacillus subtilis
ttagagacgattacaagcggaggcg

SEQ ID NO: 196333 - DNA, 25 bp, Bacillus subtilis
tttcacaaatggcagacttgaagat

SEQ ID NO: 196334 - DNA, 25 bp, Bacillus subtilis
tttacaggtgcagtcaccgaaagag

SEQ ID NO: 196335 - DNA, 25 bp, Bacillus subtilis
ttaaagaggattttgtgcctgtgca

SEQ ID NO: 196336 - DNA, 25 bp, Bacillus subtilis
gcagcagttccgctttatctattac

SEQ ID NO: 196337 - DNA, 25 bp, Saccharomyces cerevisiae
tacggaagccaacgcagtgtccttt

SEQ ID NO: 196338 - DNA, 25 bp, Saccharomyces cerevisiae
gtagaggacttcctacattttattg

SEQ ID NO: 196339 - DNA, 25 bp, Saccharomyces cerevisiae
gatccgtgccttcgataaactattg

SEQ ID NO: 196340 - DNA, 25 bp, Saccharomyces cerevisiae
gtaacgcactcattcacatcaagtt

SEQ ID NO: 196341 - DNA, 25 bp, Saccharomyces cerevisiae
ttgtaacgcactcattcacatcaag

SEQ ID NO: 196342 - DNA, 25 bp, Saccharomyces cerevisiae
taaagagatccgtgccttcgataaa

SEQ ID NO: 196343 - DNA, 25 bp, Saccharomyces cerevisiae
tctaagtttaatgctcgaaagtcct

SEQ ID NO: 196344 - DNA, 25 bp, Saccharomyces cerevisiae
aacgcactcattcacatcaagtttt

SEQ ID NO: 196345 - DNA, 25 bp, Saccharomyces cerevisiae
actattgtaacgcactcattcacat

SEQ ID NO: 196346 - DNA, 25 bp, Saccharomyces cerevisiae
agccctaatctaagtttaatgctcg

SEQ ID NO: 196347 - DNA, 25 bp, Saccharomyces cerevisiae
gaatatacctagacgtgaactcaaa

SEQ ID NO: 196348 - DNA, 25 bp, Saccharomyces cerevisiae
attaactgagcacaaaagccctaat

SEQ ID NO: 196349 - DNA, 25 bp, Saccharomyces cerevisiae
ttcacatcaagttttcagctggtac

SEQ ID NO: 196350 - DNA, 25 bp, Saccharomyces cerevisiae
ctcattcacatcaagttttcagctg

SEQ ID NO: 196351 - DNA, 25 bp, Saccharomyces cerevisiae
ctggtacggaagccaacgcagtgtc

SEQ ID NO: 196352 - DNA, 25 bp, Saccharomyces cerevisiae
cgtgccttcgataaactattgaata

SEQ ID NO: 196353 - DNA, 25 bp, Saccharomyces cerevisiae
tgccttcgataaactattgaatata

SEQ ID NO: 196354 - DNA, 25 bp, Saccharomyces cerevisiae
gaagccaacgcagtgtcctttgaca

SEQ ID NO: 196355 - DNA, 25 bp, Saccharomyces cerevisiae
ggtacggaagccaacgcagtgtcct

SEQ ID NO: 196356 - DNA, 25 bp, Saccharomyces cerevisiae
ccaacgcagtgtcctttgacacaac

SEQ ID NO: 196357 - DNA, 25 bp, Saccharomyces cerevisiae
taaatctaccattaactgagcacaa

SEQ ID NO: 196358 - DNA, 25 bp, Saccharomyces cerevisiae
tcaagttttcagctggtacggaagc

SEQ ID NO: 196359 - DNA, 25 bp, Saccharomyces cerevisiae
aagagatccgtgccttcgataaact

SEQ ID NO: 196360 - DNA, 25 bp, Saccharomyces cerevisiae
cattcacatcaagttttcagctggt

SEQ ID NO: 196361 - DNA, 25 bp, Saccharomyces cerevisiae
gtcctaactattgtaacgcactcat

SEQ ID NO: 196362 - DNA, 25 bp, Saccharomyces cerevisiae
aaactattgaatatacctagacgtg

SEQ ID NO: 196363 - DNA, 25 bp, Saccharomyces cerevisiae
agctggtacggaagccaacgcagtg

SEQ ID NO: 196364 - DNA, 25 bp, Saccharomyces cerevisiae
cgcactcattcacatcaagttttca

SEQ ID NO: 196365 - DNA, 25 bp, Saccharomyces cerevisiae
atgctcgaaagtcctaactattgta

SEQ ID NO: 196366 - DNA, 25 bp, Saccharomyces cerevisiae
cacatcaagttttcagctggtacgg

SEQ ID NO: 196367 - DNA, 25 bp, Saccharomyces cerevisiae
tttcagctggtacggaagccaacgc

SEQ ID NO: 196368 - DNA, 25 bp, Saccharomyces cerevisiae
tgacacaacattttctgattttaaa

SEQ ID NO: 196369 - DNA, 25 bp, Saccharomyces cerevisiae
tctaccattaactgagcacaaaagc

SEQ ID NO: 196370 - DNA, 25 bp, Saccharomyces cerevisiae
tttgacacaacattttctgatttta

SEQ ID NO: 196371 - DNA, 25 bp, Saccharomyces cerevisiae
ccattaactgagcacaaaagcccta

SEQ ID NO: 196372 - DNA, 25 bp, Saccharomyces cerevisiae
tgagcacaaaagccctaatctaagt

SEQ ID NO: 196373 - DNA, 25 bp, Saccharomyces cerevisiae
gagatccgtgccttcgataaactat

SEQ ID NO: 196374 - DNA, 25 bp, Saccharomyces cerevisiae
taactattgtaacgcactcattcac

SEQ ID NO: 196375 - DNA, 25 bp, Saccharomyces cerevisiae
actgagcacaaaagccctaatctaa

SEQ ID NO: 196376 - DNA, 25 bp, Saccharomyces cerevisiae
cagtgtcctttgacacaacattttc

SEQ ID NO: 196377 - DNA, 25 bp, Saccharomyces cerevisiae
aacgcagtgtcctttgacacaacat

SEQ ID NO: 196378 - DNA, 25 bp, Saccharomyces cerevisiae
atatacctagacgtgaactcaaaat

SEQ ID NO: 196379 - DNA, 25 bp, Saccharomyces cerevisiae
cctaactattgtaacgcactcattc

SEQ ID NO: 196380 - DNA, 25 bp, Saccharomyces cerevisiae
gtcctttgacacaacattttctgat

SEQ ID NO: 196381 - DNA, 25 bp, Saccharomyces cerevisiae
tattgaatatacctagacgtgaact

SEQ ID NO: 196382 - DNA, 25 bp, Saccharomyces cerevisiae
cctttgacacaacattttctgattt

SEQ ID NO: 196383 - DNA, 25 bp, Saccharomyces cerevisiae
gtgtcctttgacacaacattttctg

SEQ ID NO: 196384 - DNA, 25 bp, Saccharomyces cerevisiae
taccattaactgagcacaaaagccc

SEQ ID NO: 196385 - DNA, 25 bp, Saccharomyces cerevisiae
agccaacgcagtgtcctttgacaca

SEQ ID NO: 196386 - DNA, 25 bp, Saccharomyces cerevisiae
tttaatgctcgaaagtcctaactat

SEQ ID NO: 196387 - DNA, 25 bp, Saccharomyces cerevisiae
ctctagtcagtaatccacacgaaat

SEQ ID NO: 196388 - DNA, 25 bp, Saccharomyces cerevisiae
agatccagattcaaatcacttaagt

SEQ ID NO: 196389 - DNA, 25 bp, Saccharomyces cerevisiae
tcagtaatccacacgaaatttatgg

SEQ ID NO: 196390 - DNA, 25 bp, Saccharomyces cerevisiae
agtcagtaatccacacgaaatttat

SEQ ID NO: 196391 - DNA, 25 bp, Saccharomyces cerevisiae
tacctgaatctgcaggaaaagcaga

SEQ ID NO: 196392 - DNA, 25 bp, Saccharomyces cerevisiae
atccaaactctagccttcattcacc

SEQ ID NO: 196393 - DNA, 25 bp, Saccharomyces cerevisiae
gtattcgactagaaggtgatgagtt

SEQ ID NO: 196394 - DNA, 25 bp, Saccharomyces cerevisiae
ccaaactctagccttcattcaccaa

SEQ ID NO: 196395 - DNA, 25 bp, Saccharomyces cerevisiae
cttaattacattggcactaagttct

SEQ ID NO: 196396 - DNA, 25 bp, Saccharomyces cerevisiae
acgtctgatgaacccgtacctgaat

SEQ ID NO: 196397 - DNA, 25 bp, Saccharomyces cerevisiae
caacgtctgatgaacccgtacctga

SEQ ID NO: 196398 - DNA, 25 bp, Saccharomyces cerevisiae
tgaacccgtacctgaatctgcagga

SEQ ID NO: 196399 - DNA, 25 bp, Saccharomyces cerevisiae
ccacacgaaatttatggctccatgc

SEQ ID NO: 196400 - DNA, 25 bp, Saccharomyces cerevisiae
agatactagtattcgactagaaggt

SEQ ID NO: 196401 - DNA, 25 bp, Saccharomyces cerevisiae
gccttcattcaccaacgtctgatga

SEQ ID NO: 196402 - DNA, 25 bp, Saccharomyces cerevisiae
ccgaaactggcattaaattggcatt

SEQ ID NO: 196403 - DNA, 25 bp, Saccharomyces cerevisiae
tcattcaccaacgtctgatgaaccc

SEQ ID NO: 196404 - DNA, 25 bp, Saccharomyces cerevisiae
cttcattcaccaacgtctgatgaac

SEQ ID NO: 196405 - DNA, 25 bp, Saccharomyces cerevisiae
agtaatccacacgaaatttatggct

SEQ ID NO: 196406 - DNA, 25 bp, Saccharomyces cerevisiae
atactagtattcgactagaaggtga

SEQ ID NO: 196407 - DNA, 25 bp, Saccharomyces cerevisiae
cctgaatctgcaggaaaagcagata

SEQ ID NO: 196408 - DNA, 25 bp, Saccharomyces cerevisiae
gaagatccagattcaaatcacttaa

SEQ ID NO: 196409 - DNA, 25 bp, Saccharomyces cerevisiae
aagattctctagtcagtaatccaca

SEQ ID NO: 196410 - DNA, 25 bp, Saccharomyces cerevisiae
actctagccttcattcaccaacgtc

SEQ ID NO: 196411 - DNA, 25 bp, Saccharomyces cerevisiae
gcattggacccgaacttaattacat

SEQ ID NO: 196412 - DNA, 25 bp, Saccharomyces cerevisiae
gttctaatccaaactctagccttca

SEQ ID NO: 196413 - DNA, 25 bp, Saccharomyces cerevisiae
atccagattcaaatcacttaagttc

SEQ ID NO: 196414 - DNA, 25 bp, Saccharomyces cerevisiae
tgaatctgcaggaaaagcagatact

SEQ ID NO: 196415 - DNA, 25 bp, Saccharomyces cerevisiae
cgtacctgaatctgcaggaaaagca

SEQ ID NO: 196416 - DNA, 25 bp, Saccharomyces cerevisiae
ggcactaagttctaatccaaactct

SEQ ID NO: 196417 - DNA, 25 bp, Saccharomyces cerevisiae
attcgactagaaggtgatgagttag

SEQ ID NO: 196418 - DNA, 25 bp, Saccharomyces cerevisiae
tagccttcattcaccaacgtctgat

SEQ ID NO: 196419 - DNA, 25 bp, Saccharomyces cerevisiae
cgaacttaattacattggcactaag

SEQ ID NO: 196420 - DNA, 25 bp, Saccharomyces cerevisiae
aaactctagccttcattcaccaacg

SEQ ID NO: 196421 - DNA, 25 bp, Saccharomyces cerevisiae
ttggcactaagttctaatccaaact

SEQ ID NO: 196422 - DNA, 25 bp, Saccharomyces cerevisiae
gaaatttatggctccatgccgttgg

SEQ ID NO: 196423 - DNA, 25 bp, Saccharomyces cerevisiae
tcaccaacgtctgatgaacccgtac

SEQ ID NO: 196424 - DNA, 25 bp, Saccharomyces cerevisiae
cattggcactaagttctaatccaaa

SEQ ID NO: 196425 - DNA, 25 bp, Saccharomyces cerevisiae
aatttatggctccatgccgttggag

SEQ ID NO: 196426 - DNA, 25 bp, Saccharomyces cerevisiae
tacattggcactaagttctaatcca

SEQ ID NO: 196427 - DNA, 25 bp, Saccharomyces cerevisiae
taatccacacgaaatttatggctcc

SEQ ID NO: 196428 - DNA, 25 bp, Saccharomyces cerevisiae
gatgaacccgtacctgaatctgcag

SEQ ID NO: 196429 - DNA, 25 bp, Saccharomyces cerevisiae
gattctctagtcagtaatccacacg

SEQ ID NO: 196430 - DNA, 25 bp, Saccharomyces cerevisiae
atttatggctccatgccgttggagc

SEQ ID NO: 196431 - DNA, 25 bp, Saccharomyces cerevisiae
tctaatccaaactctagccttcatt

SEQ ID NO: 196432 - DNA, 25 bp, Saccharomyces cerevisiae
tagtattcgactagaaggtgatgag

SEQ ID NO: 196433 - DNA, 25 bp, Saccharomyces cerevisiae
taattacattggcactaagttctaa

SEQ ID NO: 196434 - DNA, 25 bp, Saccharomyces cerevisiae
tcaaatcacttaagttccgaaactg

SEQ ID NO: 196435 - DNA, 25 bp, Saccharomyces cerevisiae
ttctctagtcagtaatccacacgaa

SEQ ID NO: 196436 - DNA, 25 bp, Saccharomyces cerevisiae
ctgatgaacccgtacctgaatctgc

SEQ ID NO: 196437 - DNA, 25 bp, Saccharomyces cerevisiae
acgaaatttatggctccatgccgtt

SEQ ID NO: 196438 - DNA, 25 bp, Saccharomyces cerevisiae
agtagttcagtgttcaaaggcactg

SEQ ID NO: 196439 - DNA, 25 bp, Saccharomyces cerevisiae
taccccacagtagttcagtgttcaa

SEQ ID NO: 196440 - DNA, 25 bp, Saccharomyces cerevisiae
cacagtagttcagtgttcaaaggca

SEQ ID NO: 196441 - DNA, 25 bp, Saccharomyces cerevisiae
ttggatttgataccccacagtagtt

SEQ ID NO: 196442 - DNA, 25 bp, Saccharomyces cerevisiae
gtggtcaaaagctgttggcaattaa

SEQ ID NO: 196443 - DNA, 25 bp, Saccharomyces cerevisiae
acctataagcatgacagaggtattg

SEQ ID NO: 196444 - DNA, 25 bp, Saccharomyces cerevisiae
tgataccccacagtagttcagtgtt

SEQ ID NO: 196445 - DNA, 25 bp, Saccharomyces cerevisiae
gttcagtgttcaaaggcactgattt

SEQ ID NO: 196446 - DNA, 25 bp, Saccharomyces cerevisiae
atggttacgaagactctggatctac

SEQ ID NO: 196447 - DNA, 25 bp, Saccharomyces cerevisiae
tctacctataagcatgacagaggta

SEQ ID NO: 196448 - DNA, 25 bp, Saccharomyces cerevisiae
ccccacagtagttcagtgttcaaag

SEQ ID NO: 196449 - DNA, 25 bp, Saccharomyces cerevisiae
agaacgaacatgactattggaataa

SEQ ID NO: 196450 - DNA, 25 bp, Saccharomyces cerevisiae
ctggatctacctataagcatgacag

SEQ ID NO: 196451 - DNA, 25 bp, Saccharomyces cerevisiae
ctgatttcgtacattcagtaaagaa

SEQ ID NO: 196452 - DNA, 25 bp, Saccharomyces cerevisiae
gtgttcaaaggcactgatttcgtac

SEQ ID NO: 196453 - DNA, 25 bp, Saccharomyces cerevisiae
gtattagcaacaaggatgttatttt

SEQ ID NO: 196454 - DNA, 25 bp, Saccharomyces cerevisiae
tacgaagactctggatctacctata

SEQ ID NO: 196455 - DNA, 25 bp, Saccharomyces cerevisiae
gcactgatttcgtacattcagtaaa

SEQ ID NO: 196456 - DNA, 25 bp, Saccharomyces cerevisiae
gttacgaagactctggatctaccta

SEQ ID NO: 196457 - DNA, 25 bp, Saccharomyces cerevisiae
cccacagtagttcagtgttcaaagg

SEQ ID NO: 196458 - DNA, 25 bp, Saccharomyces cerevisiae
aagactctggatctacctataagca

SEQ ID NO: 196459 - DNA, 25 bp, Saccharomyces cerevisiae
actgatttcgtacattcagtaaaga

SEQ ID NO: 196460 - DNA, 25 bp, Saccharomyces cerevisiae
gatctacctataagcatgacagagg

SEQ ID NO: 196461 - DNA, 25 bp, Saccharomyces cerevisiae
tgttcaaaggcactgatttcgtaca

SEQ ID NO: 196462 - DNA, 25 bp, Saccharomyces cerevisiae
gaagactctggatctacctataagc

SEQ ID NO: 196463 - DNA, 25 bp, Saccharomyces cerevisiae
aaaggcactgatttcgtacattcag

SEQ ID NO: 196464 - DNA, 25 bp, Saccharomyces cerevisiae
ctagtggtcaaaagctgttggcaat

SEQ ID NO: 196465 - DNA, 25 bp, Saccharomyces cerevisiae
atttgataccccacagtagttcagt

SEQ ID NO: 196466 - DNA, 25 bp, Saccharomyces cerevisiae
tctggatctacctataagcatgaca

SEQ ID NO: 196467 - DNA, 25 bp, Saccharomyces cerevisiae
tatggttacgaagactctggatcta

SEQ ID NO: 196468 - DNA, 25 bp, Saccharomyces cerevisiae
cagtgttcaaaggcactgatttcgt

SEQ ID NO: 196469 - DNA, 25 bp, Saccharomyces cerevisiae
ccatattacagaacgaacatgacta

SEQ ID NO: 196470 - DNA, 25 bp, Saccharomyces cerevisiae
actctggatctacctataagcatga

SEQ ID NO: 196471 - DNA, 25 bp, Saccharomyces cerevisiae
tcagtgttcaaaggcactgatttcg

SEQ ID NO: 196472 - DNA, 25 bp, Saccharomyces cerevisiae
ttcaaaggcactgatttcgtacatt

SEQ ID NO: 196473 - DNA, 25 bp, Saccharomyces cerevisiae
atattacagaacgaacatgactatt

SEQ ID NO: 196474 - DNA, 25 bp, Saccharomyces cerevisiae
gtagttcagtgttcaaaggcactga

SEQ ID NO: 196475 - DNA, 25 bp, Saccharomyces cerevisiae
aaggcactgatttcgtacattcagt

SEQ ID NO: 196476 - DNA, 25 bp, Saccharomyces cerevisiae
atatagaatcacaaaatttggattt

SEQ ID NO: 196477 - DNA, 25 bp, Saccharomyces cerevisiae
cctataagcatgacagaggtattgc

SEQ ID NO: 196478 - DNA, 25 bp, Saccharomyces cerevisiae
aacgaacatgactattggaataaga

SEQ ID NO: 196479 - DNA, 25 bp, Saccharomyces cerevisiae
ttcgtacattcagtaaagaaattct

SEQ ID NO: 196480 - DNA, 25 bp, Saccharomyces cerevisiae
ggatctacctataagcatgacagag

SEQ ID NO: 196481 - DNA, 25 bp, Saccharomyces cerevisiae
gttccatattacagaacgaacatga

SEQ ID NO: 196482 - DNA, 25 bp, Saccharomyces cerevisiae
ttacagaacgaacatgactattgga

SEQ ID NO: 196483 - DNA, 25 bp, Saccharomyces cerevisiae
gatttgataccccacagtagttcag

SEQ ID NO: 196484 - DNA, 25 bp, Saccharomyces cerevisiae
ggttacgaagactctggatctacct

SEQ ID NO: 196485 - DNA, 25 bp, Saccharomyces cerevisiae
atttggatttgataccccacagtag

SEQ ID NO: 196486 - DNA, 25 bp, Saccharomyces cerevisiae
ataccccacagtagttcagtgttca

SEQ ID NO: 196487 - DNA, 25 bp, Saccharomyces cerevisiae
tccatattacagaacgaacatgact

SEQ ID NO: 196488 - DNA, 25 bp, Saccharomyces cerevisiae
atacgtctagaagggttagcattca

SEQ ID NO: 196489 - DNA, 25 bp, Saccharomyces cerevisiae
ctttctcctcctatgagccagaatt

SEQ ID NO: 196490 - DNA, 25 bp, Saccharomyces cerevisiae
gtactttctcctcctatgagccaga

SEQ ID NO: 196491 - DNA, 25 bp, Saccharomyces cerevisiae
cctatacgtctagaagggttagcat

SEQ ID NO: 196492 - DNA, 25 bp, Saccharomyces cerevisiae
aagattgttcttactggtgcaaagc

SEQ ID NO: 196493 - DNA, 25 bp, Saccharomyces cerevisiae
ttactggtgcaaagcaaagggaaga

SEQ ID NO: 196494 - DNA, 25 bp, Saccharomyces cerevisiae
agtcatggtactttctcctcctatg

SEQ ID NO: 196495 - DNA, 25 bp, Saccharomyces cerevisiae
tataccctgtgctaagtgaatttag

SEQ ID NO: 196496 - DNA, 25 bp, Saccharomyces cerevisiae
gaaagattgttcttactggtgcaaa

SEQ ID NO: 196497 - DNA, 25 bp, Saccharomyces cerevisiae
ttcagtcatggtactttctcctcct

SEQ ID NO: 196498 - DNA, 25 bp, Saccharomyces cerevisiae
ggtactttctcctcctatgagccag

SEQ ID NO: 196499 - DNA, 25 bp, Saccharomyces cerevisiae
ctatataccctgtgctaagtgaatt

SEQ ID NO: 196500 - DNA, 25 bp, Saccharomyces cerevisiae
ttctcctcctatgagccagaattgt

SEQ ID NO: 196501 - DNA, 25 bp, Saccharomyces cerevisiae
tgtttcctggtttgatctatagaat

SEQ ID NO: 196502 - DNA, 25 bp, Saccharomyces cerevisiae
ttgaagctatataccctgtgctaag

SEQ ID NO: 196503 - DNA, 25 bp, Saccharomyces cerevisiae
taccctgtgctaagtgaatttagaa

SEQ ID NO: 196504 - DNA, 25 bp, Saccharomyces cerevisiae
ggttagcattcagtcatggtacttt

SEQ ID NO: 196505 - DNA, 25 bp, Saccharomyces cerevisiae
agccagaattgtttcctggtttgat

SEQ ID NO: 196506 - DNA, 25 bp, Saccharomyces cerevisiae
cagaattgtttcctggtttgatcta

SEQ ID NO: 196507 - DNA, 25 bp, Saccharomyces cerevisiae
tctcctcctatgagccagaattgtt

SEQ ID NO: 196508 - DNA, 25 bp, Saccharomyces cerevisiae
gagccagaattgtttcctggtttga

SEQ ID NO: 196509 - DNA, 25 bp, Saccharomyces cerevisiae
attgttcttactggtgcaaagcaaa

SEQ ID NO: 196510 - DNA, 25 bp, Saccharomyces cerevisiae
ccagaattgtttcctggtttgatct

SEQ ID NO: 196511 - DNA, 25 bp, Saccharomyces cerevisiae
tcctcctatgagccagaattgtttc

SEQ ID NO: 196512 - DNA, 25 bp, Saccharomyces cerevisiae
tttgaagctatataccctgtgctaa

SEQ ID NO: 196513 - DNA, 25 bp, Saccharomyces cerevisiae
cttactggtgcaaagcaaagggaag

SEQ ID NO: 196514 - DNA, 25 bp, Saccharomyces cerevisiae
cttttgaagctatataccctgtgct

SEQ ID NO: 196515 - DNA, 25 bp, Saccharomyces cerevisiae
tcagtcatggtactttctcctccta

SEQ ID NO: 196516 - DNA, 25 bp, Saccharomyces cerevisiae
ggaaagattgttcttactggtgcaa

SEQ ID NO: 196517 - DNA, 25 bp, Saccharomyces cerevisiae
tcctatgagccagaattgtttcctg

SEQ ID NO: 196518 - DNA, 25 bp, Saccharomyces cerevisiae
cctatgagccagaattgtttcctgg

SEQ ID NO: 196519 - DNA, 25 bp, Saccharomyces cerevisiae
gttcttactggtgcaaagcaaaggg

SEQ ID NO: 196520 - DNA, 25 bp, Saccharomyces cerevisiae
atggtactttctcctcctatgagcc

SEQ ID NO: 196521 - DNA, 25 bp, Saccharomyces cerevisiae
gctatataccctgtgctaagtgaat

SEQ ID NO: 196522 - DNA, 25 bp, Saccharomyces cerevisiae
gcattcagtcatggtactttctcct

SEQ ID NO: 196523 - DNA, 25 bp, Saccharomyces cerevisiae
tacgtctagaagggttagcattcag

SEQ ID NO: 196524 - DNA, 25 bp, Saccharomyces cerevisiae
aattgtttcctggtttgatctatag

SEQ ID NO: 196525 - DNA, 25 bp, Saccharomyces cerevisiae
gaagctatataccctgtgctaagtg

SEQ ID NO: 196526 - DNA, 25 bp, Saccharomyces cerevisiae
taccaagcttttgaagctatatacc

SEQ ID NO: 196527 - DNA, 25 bp, Saccharomyces cerevisiae
tttaccaagcttttgaagctatata

SEQ ID NO: 196528 - DNA, 25 bp, Saccharomyces cerevisiae
ttagcattcagtcatggtactttct

SEQ ID NO: 196529 - DNA, 25 bp, Saccharomyces cerevisiae
tagcattcagtcatggtactttctc

SEQ ID NO: 196530 - DNA, 25 bp, Saccharomyces cerevisiae
catggtactttctcctcctatgagc

SEQ ID NO: 196531 - DNA, 25 bp, Saccharomyces cerevisiae
gtcatggtactttctcctcctatga

SEQ ID NO: 196532 - DNA, 25 bp, Saccharomyces cerevisiae
ttgttcttactggtgcaaagcaaag

SEQ ID NO: 196533 - DNA, 25 bp, Saccharomyces cerevisiae
tttcctggtttgatctatagaatgg

SEQ ID NO: 196534 - DNA, 25 bp, Saccharomyces cerevisiae
aagctatataccctgtgctaagtga

SEQ ID NO: 196535 - DNA, 25 bp, Saccharomyces cerevisiae
atataccctgtgctaagtgaattta

SEQ ID NO: 196536 - DNA, 25 bp, Saccharomyces cerevisiae
ttcttactggtgcaaagcaaaggga

SEQ ID NO: 196537 - DNA, 25 bp, Saccharomyces cerevisiae
ttgtttcctggtttgatctatagaa

SEQ ID NO: 196538 - DNA, 25 bp, Saccharomyces cerevisiae
actactttccagagtgaagaggaca

SEQ ID NO: 196539 - DNA, 25 bp, Saccharomyces cerevisiae
cactacaaaacattgtggcaactgt

SEQ ID NO: 196540 - DNA, 25 bp, Saccharomyces cerevisiae
gatccaaataccagacaagtatggg

SEQ ID NO: 196541 - DNA, 25 bp, Saccharomyces cerevisiae
aaaccagcaactactttccagagtg

SEQ ID NO: 196542 - DNA, 25 bp, Saccharomyces cerevisiae
ttgatccaaataccagacaagtatg

SEQ ID NO: 196543 - DNA, 25 bp, Saccharomyces cerevisiae
agcaactactttccagagtgaagag

SEQ ID NO: 196544 - DNA, 25 bp, Saccharomyces cerevisiae
ccgccacatcaggtattgttccaac

SEQ ID NO: 196545 - DNA, 25 bp, Saccharomyces cerevisiae
acatcaggtattgttccaacactac

SEQ ID NO: 196546 - DNA, 25 bp, Saccharomyces cerevisiae
cattgtggcaactgtgactttgggg

SEQ ID NO: 196547 - DNA, 25 bp, Saccharomyces cerevisiae
tactttccagagtgaagaggacata

SEQ ID NO: 196548 - DNA, 25 bp, Saccharomyces cerevisiae
ccaacactacaaaacattgtggcaa

SEQ ID NO: 196549 - DNA, 25 bp, Saccharomyces cerevisiae
caactactttccagagtgaagagga

SEQ ID NO: 196550 - DNA, 25 bp, Saccharomyces cerevisiae
tttgatccaaataccagacaagtat

SEQ ID NO: 196551 - DNA, 25 bp, Saccharomyces cerevisiae
acataaaaagagctgccccagaatc

SEQ ID NO: 196552 - DNA, 25 bp, Saccharomyces cerevisiae
gctgccccagaatctgaaaaagaca

SEQ ID NO: 196553 - DNA, 25 bp, Saccharomyces cerevisiae
cacatcaggtattgttccaacacta

SEQ ID NO: 196554 - DNA, 25 bp, Saccharomyces cerevisiae
caacactacaaaacattgtggcaac

SEQ ID NO: 196555 - DNA, 25 bp, Saccharomyces cerevisiae
accagcaactactttccagagtgaa

SEQ ID NO: 196556 - DNA, 25 bp, Saccharomyces cerevisiae
ctactttccagagtgaagaggacat

SEQ ID NO: 196557 - DNA, 25 bp, Saccharomyces cerevisiae
gccacatcaggtattgttccaacac

SEQ ID NO: 196558 - DNA, 25 bp, Saccharomyces cerevisiae
gagctgccccagaatctgaaaaaga

SEQ ID NO: 196559 - DNA, 25 bp, Saccharomyces cerevisiae
agtgtttgatccaaataccagacaa

SEQ ID NO: 196560 - DNA, 25 bp, Saccharomyces cerevisiae
cagcaactactttccagagtgaaga

SEQ ID NO: 196561 - DNA, 25 bp, Saccharomyces cerevisiae
cataaaaagagctgccccagaatct

SEQ ID NO: 196562 - DNA, 25 bp, Saccharomyces cerevisiae
tttccagagtgaagaggacataaaa

SEQ ID NO: 196563 - DNA, 25 bp, Saccharomyces cerevisiae
agagctgccccagaatctgaaaaag

SEQ ID NO: 196564 - DNA, 25 bp, Saccharomyces cerevisiae
tacaaaaccagcaactactttccag

SEQ ID NO: 196565 - DNA, 25 bp, Saccharomyces cerevisiae
tccgccacatcaggtattgttccaa

SEQ ID NO: 196566 - DNA, 25 bp, Saccharomyces cerevisiae
agctgccccagaatctgaaaaagac

SEQ ID NO: 196567 - DNA, 25 bp, Saccharomyces cerevisiae
tccaacactacaaaacattgtggca

SEQ ID NO: 196568 - DNA, 25 bp, Saccharomyces cerevisiae
tgtttgatccaaataccagacaagt

SEQ ID NO: 196569 - DNA, 25 bp, Saccharomyces cerevisiae
aacattgtggcaactgtgactttgg

SEQ ID NO: 196570 - DNA, 25 bp, Saccharomyces cerevisiae
tgatccaaataccagacaagtatgg

SEQ ID NO: 196571 - DNA, 25 bp, Saccharomyces cerevisiae
gcaactactttccagagtgaagagg

SEQ ID NO: 196572 - DNA, 25 bp, Saccharomyces cerevisiae
gccccagaatctgaaaaagacacct

SEQ ID NO: 196573 - DNA, 25 bp, Saccharomyces cerevisiae
ttgttccaacactacaaaacattgt

SEQ ID NO: 196574 - DNA, 25 bp, Saccharomyces cerevisiae
aacactacaaaacattgtggcaact

SEQ ID NO: 196575 - DNA, 25 bp, Saccharomyces cerevisiae
actttccagagtgaagaggacataa

SEQ ID NO: 196576 - DNA, 25 bp, Saccharomyces cerevisiae
aaccagcaactactttccagagtga

SEQ ID NO: 196577 - DNA, 25 bp, Saccharomyces cerevisiae
tgttccaacactacaaaacattgtg

SEQ ID NO: 196578 - DNA, 25 bp, Saccharomyces cerevisiae
gtattgttccaacactacaaaacat

SEQ ID NO: 196579 - DNA, 25 bp, Saccharomyces cerevisiae
gttccaacactacaaaacattgtgg

SEQ ID NO: 196580 - DNA, 25 bp, Saccharomyces cerevisiae
atcaggtattgttccaacactacaa

SEQ ID NO: 196581 - DNA, 25 bp, Saccharomyces cerevisiae
actacaaaacattgtggcaactgtg

SEQ ID NO: 196582 - DNA, 25 bp, Saccharomyces cerevisiae
catcaggtattgttccaacactaca

SEQ ID NO: 196583 - DNA, 25 bp, Saccharomyces cerevisiae
ctacaaaacattgtggcaactgtga

SEQ ID NO: 196584 - DNA, 25 bp, Saccharomyces cerevisiae
attgttccaacactacaaaacattg

SEQ ID NO: 196585 - DNA, 25 bp, Saccharomyces cerevisiae
cgccacatcaggtattgttccaaca

SEQ ID NO: 196586 - DNA, 25 bp, Saccharomyces cerevisiae
tccaaataccagacaagtatgggaa

SEQ ID NO: 196587 - DNA, 25 bp, Saccharomyces cerevisiae
tgccccagaatctgaaaaagacacc

SEQ ID NO: 196588 - DNA, 25 bp, Saccharomyces cerevisiae
gtgtttgatccaaataccagacaag

SEQ ID NO: 196589 - DNA, 25 bp, Saccharomyces cerevisiae
ttgctgctaaattcacagacttcaa

SEQ ID NO: 196590 - DNA, 25 bp, Saccharomyces cerevisiae
caaagctggccagtagaaaatatgc

SEQ ID NO: 196591 - DNA, 25 bp, Saccharomyces cerevisiae
ctaaattcacagacttcaaaataca

SEQ ID NO: 196592 - DNA, 25 bp, Saccharomyces cerevisiae
ctgaaaacagttgcgctacatgccc

SEQ ID NO: 196593 - DNA, 25 bp, Saccharomyces cerevisiae
gttgcgctacatgcccgtaatgcag

SEQ ID NO: 196594 - DNA, 25 bp, Saccharomyces cerevisiae
cagttgcgctacatgcccgtaatgc

SEQ ID NO: 196595 - DNA, 25 bp, Saccharomyces cerevisiae
ctgctaaattcacagacttcaaaat

SEQ ID NO: 196596 - DNA, 25 bp, Saccharomyces cerevisiae
aaccccaagcgttttgctgctgtca

SEQ ID NO: 196597 - DNA, 25 bp, Saccharomyces cerevisiae
gcagaatataaccccaagcgttttg

SEQ ID NO: 196598 - DNA, 25 bp, Saccharomyces cerevisiae
tttgctgctaaattcacagacttca

SEQ ID NO: 196599 - DNA, 25 bp, Saccharomyces cerevisiae
aatgcagaatataaccccaagcgtt

SEQ ID NO: 196600 - DNA, 25 bp, Saccharomyces cerevisiae
cccaagcgttttgctgctgtcatca

SEQ ID NO: 196601 - DNA, 25 bp, Saccharomyces cerevisiae
tcgggtttgctgctaaattcacaga

SEQ ID NO: 196602 - DNA, 25 bp, Saccharomyces cerevisiae
atgcagaatataaccccaagcgttt

SEQ ID NO: 196603 - DNA, 25 bp, Saccharomyces cerevisiae
gcgctacatgcccgtaatgcagaat

SEQ ID NO: 196604 - DNA, 25 bp, Saccharomyces cerevisiae
tcaaagctggccagtagaaaatatg

SEQ ID NO: 196605 - DNA, 25 bp, Saccharomyces cerevisiae
accccaagcgttttgctgctgtcat

SEQ ID NO: 196606 - DNA, 25 bp, Saccharomyces cerevisiae
cgctacatgcccgtaatgcagaata

SEQ ID NO: 196607 - DNA, 25 bp, Saccharomyces cerevisiae
atgcccgtaatgcagaatataaccc

SEQ ID NO: 196608 - DNA, 25 bp, Saccharomyces cerevisiae
aagctggccagtagaaaatatgcaa

SEQ ID NO: 196609 - DNA, 25 bp, Saccharomyces cerevisiae
ataaccccaagcgttttgctgctgt

SEQ ID NO: 196610 - DNA, 25 bp, Saccharomyces cerevisiae
agcgttttgctgctgtcatcatgcg

SEQ ID NO: 196611 - DNA, 25 bp, Saccharomyces cerevisiae
atgactcaaagctggccagtagaaa

SEQ ID NO: 196612 - DNA, 25 bp, Saccharomyces cerevisiae
ggtttgctgctaaattcacagactt

SEQ ID NO: 196613 - DNA, 25 bp, Saccharomyces cerevisiae
atcgggtttgctgctaaattcacag

SEQ ID NO: 196614 - DNA, 25 bp, Saccharomyces cerevisiae
aggatgactcaaagctggccagtag

SEQ ID NO: 196615 - DNA, 25 bp, Saccharomyces cerevisiae
gctgctaaattcacagacttcaaaa

SEQ ID NO: 196616 - DNA, 25 bp, Saccharomyces cerevisiae
ctgctgtcatcatgcgtattagaga

SEQ ID NO: 196617 - DNA, 25 bp, Saccharomyces cerevisiae
catgcccgtaatgcagaatataacc

SEQ ID NO: 196618 - DNA, 25 bp, Saccharomyces cerevisiae
tttgctgctgtcatcatgcgtatta

SEQ ID NO: 196619 - DNA, 25 bp, Saccharomyces cerevisiae
gtcatcatgcgtattagagagccaa

SEQ ID NO: 196620 - DNA, 25 bp, Saccharomyces cerevisiae
gagagccaaaaactacagctttaat

SEQ ID NO: 196621 - DNA, 25 bp, Saccharomyces cerevisiae
gctgctgtcatcatgcgtattagag

SEQ ID NO: 196622 - DNA, 25 bp, Saccharomyces cerevisiae
ctgtcatcatgcgtattagagagcc

SEQ ID NO: 196623 - DNA, 25 bp, Saccharomyces cerevisiae
cgttttgctgctgtcatcatgcgta

SEQ ID NO: 196624 - DNA, 25 bp, Saccharomyces cerevisiae
ttgcgctacatgcccgtaatgcaga

SEQ ID NO: 196625 - DNA, 25 bp, Saccharomyces cerevisiae
acagttgcgctacatgcccgtaatg

SEQ ID NO: 196626 - DNA, 25 bp, Saccharomyces cerevisiae
atcatgcgtattagagagccaaaaa

SEQ ID NO: 196627 - DNA, 25 bp, Saccharomyces cerevisiae
ttgctgctgtcatcatgcgtattag

SEQ ID NO: 196628 - DNA, 25 bp, Saccharomyces cerevisiae
aagcgttttgctgctgtcatcatgc

SEQ ID NO: 196629 - DNA, 25 bp, Saccharomyces cerevisiae
gttaccggtgcaaaaagtgaggatg

SEQ ID NO: 196630 - DNA, 25 bp, Saccharomyces cerevisiae
cagacttcaaaatacaaaatattgt

SEQ ID NO: 196631 - DNA, 25 bp, Saccharomyces cerevisiae
gatgactcaaagctggccagtagaa

SEQ ID NO: 196632 - DNA, 25 bp, Saccharomyces cerevisiae
gacttcaaaatacaaaatattgtcg

SEQ ID NO: 196633 - DNA, 25 bp, Saccharomyces cerevisiae
ttaccggtgcaaaaagtgaggatga

SEQ ID NO: 196634 - DNA, 25 bp, Saccharomyces cerevisiae
gaatataaccccaagcgttttgctg

SEQ ID NO: 196635 - DNA, 25 bp, Saccharomyces cerevisiae
gactcaaagctggccagtagaaaat

SEQ ID NO: 196636 - DNA, 25 bp, Saccharomyces cerevisiae
gttttgctgctgtcatcatgcgtat

SEQ ID NO: 196637 - DNA, 25 bp, Saccharomyces cerevisiae
tacatgcccgtaatgcagaatataa

SEQ ID NO: 196638 - DNA, 25 bp, Saccharomyces cerevisiae
tcatcatgcgtattagagagccaaa

SEQ ID NO: 196639 - DNA, 25 bp, Saccharomyces cerevisiae
aagtgtgatgtcgatgtccgtaagg

SEQ ID NO: 196640 - DNA, 25 bp, Saccharomyces cerevisiae
aatcaccgctttggctccatcttcc

SEQ ID NO: 196641 - DNA, 25 bp, Saccharomyces cerevisiae
ctttggctccatcttccatgaaggt

SEQ ID NO: 196642 - DNA, 25 bp, Saccharomyces cerevisiae
gatcattgctcctccagaaagaaag

SEQ ID NO: 196643 - DNA, 25 bp, Saccharomyces cerevisiae
caggtattgccgaaagaatgcaaaa

SEQ ID NO: 196644 - DNA, 25 bp, Saccharomyces cerevisiae
gaaagtggtccatctatcgttcacc

SEQ ID NO: 196645 - DNA, 25 bp, Saccharomyces cerevisiae
tcgatgtccgtaaggaattatacgg

SEQ ID NO: 196646 - DNA, 25 bp, Saccharomyces cerevisiae
taccaccatgttcccaggtattgcc

SEQ ID NO: 196647 - DNA, 25 bp, Saccharomyces cerevisiae
tatgtccggtggtaccaccatgttc

SEQ ID NO: 196648 - DNA, 25 bp, Saccharomyces cerevisiae
gaattatacggtaacatcgttatgt

SEQ ID NO: 196649 - DNA, 25 bp, Saccharomyces cerevisiae
ccaacaaatgtggatctcaaaacaa

SEQ ID NO: 196650 - DNA, 25 bp, Saccharomyces cerevisiae
ttcccaggtattgccgaaagaatgc

SEQ ID NO: 196651 - DNA, 25 bp, Saccharomyces cerevisiae
tatacggtaacatcgttatgtccgg

SEQ ID NO: 196652 - DNA, 25 bp, Saccharomyces cerevisiae
gattggtggttctatcttggcttct

SEQ ID NO: 196653 - DNA, 25 bp, Saccharomyces cerevisiae
cgacgaaagtggtccatctatcgtt

SEQ ID NO: 196654 - DNA, 25 bp, Saccharomyces cerevisiae
gaaagtactccgtctggattggtgg

SEQ ID NO: 196655 - DNA, 25 bp, Saccharomyces cerevisiae
tccggtggtaccaccatgttcccag

SEQ ID NO: 196656 - DNA, 25 bp, Saccharomyces cerevisiae
ctatcgttcaccacaagtgtttcta

SEQ ID NO: 196657 - DNA, 25 bp, Saccharomyces cerevisiae
cgctttggctccatcttccatgaag

SEQ ID NO: 196658 - DNA, 25 bp, Saccharomyces cerevisiae
catctatcgttcaccacaagtgttt

SEQ ID NO: 196659 - DNA, 25 bp, Saccharomyces cerevisiae
gtactccgtctggattggtggttct

SEQ ID NO: 196660 - DNA, 25 bp, Saccharomyces cerevisiae
tcattgctcctccagaaagaaagta

SEQ ID NO: 196661 - DNA, 25 bp, Saccharomyces cerevisiae
tcttggcttctttgactaccttcca

SEQ ID NO: 196662 - DNA, 25 bp, Saccharomyces cerevisiae
atcttccatgaaggtcaagatcatt

SEQ ID NO: 196663 - DNA, 25 bp, Saccharomyces cerevisiae
ggtccatctatcgttcaccacaagt

SEQ ID NO: 196664 - DNA, 25 bp, Saccharomyces cerevisiae
ttccaacaaatgtggatctcaaaac

SEQ ID NO: 196665 - DNA, 25 bp, Saccharomyces cerevisiae
tgactaccttccaacaaatgtggat

SEQ ID NO: 196666 - DNA, 25 bp, Saccharomyces cerevisiae
cttccatgaaggtcaagatcattgc

SEQ ID NO: 196667 - DNA, 25 bp, Saccharomyces cerevisiae
tgttcccaggtattgccgaaagaat

SEQ ID NO: 196668 - DNA, 25 bp, Saccharomyces cerevisiae
gtgatgtcgatgtccgtaaggaatt

SEQ ID NO: 196669 - DNA, 25 bp, Saccharomyces cerevisiae
ggtggttctatcttggcttctttga

SEQ ID NO: 196670 - DNA, 25 bp, Saccharomyces cerevisiae
tcaccgctttggctccatcttccat

SEQ ID NO: 196671 - DNA, 25 bp, Saccharomyces cerevisiae
gatgtcgatgtccgtaaggaattat

SEQ ID NO: 196672 - DNA, 25 bp, Saccharomyces cerevisiae
tggattggtggttctatcttggctt

SEQ ID NO: 196673 - DNA, 25 bp, Saccharomyces cerevisiae
gttctatcttggcttctttgactac

SEQ ID NO: 196674 - DNA, 25 bp, Saccharomyces cerevisiae
ttggctccatcttccatgaaggtca

SEQ ID NO: 196675 - DNA, 25 bp, Saccharomyces cerevisiae
tacggtaacatcgttatgtccggtg

SEQ ID NO: 196676 - DNA, 25 bp, Saccharomyces cerevisiae
actccgtctggattggtggttctat

SEQ ID NO: 196677 - DNA, 25 bp, Saccharomyces cerevisiae
tccatctatcgttcaccacaagtgt

SEQ ID NO: 196678 - DNA, 25 bp, Saccharomyces cerevisiae
atcatgaagtgtgatgtcgatgtcc

SEQ ID NO: 196679 - DNA, 25 bp, Saccharomyces cerevisiae
gtggtccatctatcgttcaccacaa

SEQ ID NO: 196680 - DNA, 25 bp, Saccharomyces cerevisiae
tacgacgaaagtggtccatctatcg

SEQ ID NO: 196681 - DNA, 25 bp, Saccharomyces cerevisiae
actaccttccaacaaatgtggatct

SEQ ID NO: 196682 - DNA, 25 bp, Saccharomyces cerevisiae
taccttccaacaaatgtggatctca

SEQ ID NO: 196683 - DNA, 25 bp, Saccharomyces cerevisiae
aggaaatcaccgctttggctccatc

SEQ ID NO: 196684 - DNA, 25 bp, Saccharomyces cerevisiae
cgtctggattggtggttctatcttg

SEQ ID NO: 196685 - DNA, 25 bp, Saccharomyces cerevisiae
tgtcgatgtccgtaaggaattatac

SEQ ID NO: 196686 - DNA, 25 bp, Saccharomyces cerevisiae
ccatcttccatgaaggtcaagatca

SEQ ID NO: 196687 - DNA, 25 bp, Saccharomyces cerevisiae
tgctcctccagaaagaaagtactcc

SEQ ID NO: 196688 - DNA, 25 bp, Saccharomyces cerevisiae
gaaagaaagtactccgtctggattg

SEQ ID NO: 196689 - DNA, 25 bp, Saccharomyces cerevisiae
tttgactaccttccaacaaatgtgg

SEQ ID NO: 196690 - DNA, 25 bp, Saccharomyces cerevisiae
gctcaatccaagagaggtatcttga

SEQ ID NO: 196691 - DNA, 25 bp, Saccharomyces cerevisiae
gacgacgctcctcgtgctgtcttcc

SEQ ID NO: 196692 - DNA, 25 bp, Saccharomyces cerevisiae
ctacaacgaattgagagttgcccca

SEQ ID NO: 196693 - DNA, 25 bp, Saccharomyces cerevisiae
caccaaggtatcatggtcggtatgg

SEQ ID NO: 196694 - DNA, 25 bp, Saccharomyces cerevisiae
gtgatgaagctcaatccaagagagg

SEQ ID NO: 196695 - DNA, 25 bp, Saccharomyces cerevisiae
ttgagagttgccccagaagaacacc

SEQ ID NO: 196696 - DNA, 25 bp, Saccharomyces cerevisiae
gagttgccccagaagaacaccctgt

SEQ ID NO: 196697 - DNA, 25 bp, Saccharomyces cerevisiae
tctggtatgtgtaaagccggttttg

SEQ ID NO: 196698 - DNA, 25 bp, Saccharomyces cerevisiae
gaccaagacaccaaggtatcatggt

SEQ ID NO: 196699 - DNA, 25 bp, Saccharomyces cerevisiae
tcctcgtgctgtcttcccatctatc

SEQ ID NO: 196700 - DNA, 25 bp, Saccharomyces cerevisiae
ccaattgaacacggtattgtcacca

SEQ ID NO: 196701 - DNA, 25 bp, Saccharomyces cerevisiae
cttcccatctatcgtcggtagacca

SEQ ID NO: 196702 - DNA, 25 bp, Saccharomyces cerevisiae
gagagttgccccagaagaacaccct

SEQ ID NO: 196703 - DNA, 25 bp, Saccharomyces cerevisiae
ccaagacaccaaggtatcatggtcg

SEQ ID NO: 196704 - DNA, 25 bp, Saccharomyces cerevisiae
actcctacgttggtgatgaagctca

SEQ ID NO: 196705 - DNA, 25 bp, Saccharomyces cerevisiae
tcaaaaagactcctacgttggtgat

SEQ ID NO: 196706 - DNA, 25 bp, Saccharomyces cerevisiae
ttctacaacgaattgagagttgccc

SEQ ID NO: 196707 - DNA, 25 bp, Saccharomyces cerevisiae
agactcctacgttggtgatgaagct

SEQ ID NO: 196708 - DNA, 25 bp, Saccharomyces cerevisiae
tgataacggttctggtatgtgtaaa

SEQ ID NO: 196709 - DNA, 25 bp, Saccharomyces cerevisiae
ttgctgctttggttattgataacgg

SEQ ID NO: 196710 - DNA, 25 bp, Saccharomyces cerevisiae
tgccccagaagaacaccctgttctt

SEQ ID NO: 196711 - DNA, 25 bp, Saccharomyces cerevisiae
atcataccttctacaacgaattgag

SEQ ID NO: 196712 - DNA, 25 bp, Saccharomyces cerevisiae
ctcgtgctgtcttcccatctatcgt

SEQ ID NO: 196713 - DNA, 25 bp, Saccharomyces cerevisiae
ttgccggtgacgacgctcctcgtgc

SEQ ID NO: 196714 - DNA, 25 bp, Saccharomyces cerevisiae
gtgacgacgctcctcgtgctgtctt

SEQ ID NO: 196715 - DNA, 25 bp, Saccharomyces cerevisiae
ttttgccggtgacgacgctcctcgt

SEQ ID NO: 196716 - DNA, 25 bp, Saccharomyces cerevisiae
tgaagctcaatccaagagaggtatc

SEQ ID NO: 196717 - DNA, 25 bp, Saccharomyces cerevisiae
atcgtcggtagaccaagacaccaag

SEQ ID NO: 196718 - DNA, 25 bp, Saccharomyces cerevisiae
aagacaccaaggtatcatggtcggt

SEQ ID NO: 196719 - DNA, 25 bp, Saccharomyces cerevisiae
tcggtagaccaagacaccaaggtat

SEQ ID NO: 196720 - DNA, 25 bp, Saccharomyces cerevisiae
tcccatctatcgtcggtagaccaag

SEQ ID NO: 196721 - DNA, 25 bp, Saccharomyces cerevisiae
taccttctacaacgaattgagagtt

SEQ ID NO: 196722 - DNA, 25 bp, Saccharomyces cerevisiae
cgtgctgtcttcccatctatcgtcg

SEQ ID NO: 196723 - DNA, 25 bp, Saccharomyces cerevisiae
cataccttctacaacgaattgagag

SEQ ID NO: 196724 - DNA, 25 bp, Saccharomyces cerevisiae
ggtatcatggtcggtatgggtcaaa

SEQ ID NO: 196725 - DNA, 25 bp, Saccharomyces cerevisiae
attgataacggttctggtatgtgta

SEQ ID NO: 196726 - DNA, 25 bp, Saccharomyces cerevisiae
tcaatccaagagaggtatcttgact

SEQ ID NO: 196727 - DNA, 25 bp, Saccharomyces cerevisiae
aaggtatcatggtcggtatgggtca

SEQ ID NO: 196728 - DNA, 25 bp, Saccharomyces cerevisiae
tgctgtcttcccatctatcgtcggt

SEQ ID NO: 196729 - DNA, 25 bp, Saccharomyces cerevisiae
tcatggtcggtatgggtcaaaaaga

SEQ ID NO: 196730 - DNA, 25 bp, Saccharomyces cerevisiae
tcctacgttggtgatgaagctcaat

SEQ ID NO: 196731 - DNA, 25 bp, Saccharomyces cerevisiae
ccatctatcgtcggtagaccaagac

SEQ ID NO: 196732 - DNA, 25 bp, Saccharomyces cerevisiae
ccaaggtatcatggtcggtatgggt

SEQ ID NO: 196733 - DNA, 25 bp, Saccharomyces cerevisiae
ctatcgtcggtagaccaagacacca

SEQ ID NO: 196734 - DNA, 25 bp, Saccharomyces cerevisiae
aagctcaatccaagagaggtatctt

SEQ ID NO: 196735 - DNA, 25 bp, Saccharomyces cerevisiae
tagaccaagacaccaaggtatcatg

SEQ ID NO: 196736 - DNA, 25 bp, Saccharomyces cerevisiae
gatctggcatcataccttctacaac

SEQ ID NO: 196737 - DNA, 25 bp, Saccharomyces cerevisiae
ttgaacacggtattgtcaccaactg

SEQ ID NO: 196738 - DNA, 25 bp, Saccharomyces cerevisiae
gccggtgacgacgctcctcgtgctg

SEQ ID NO: 196739 - DNA, 25 bp, Saccharomyces cerevisiae
gcatcataccttctacaacgaattg

SEQ ID NO: 196740 - DNA, 25 bp, Saccharomyces cerevisiae
aattgagagttgccccagaagaaca

SEQ ID NO: 196741 - DNA, 25 bp, Saccharomyces cerevisiae
gatcttgagtgaacgtggttactct

SEQ ID NO: 196742 - DNA, 25 bp, Saccharomyces cerevisiae
gaaattgtccgtgacatcaaggaaa

SEQ ID NO: 196743 - DNA, 25 bp, Saccharomyces cerevisiae
tggtgttactcacgtcgttccaatt

SEQ ID NO: 196744 - DNA, 25 bp, Saccharomyces cerevisiae
ctacttgatgaagatcttgagtgaa

SEQ ID NO: 196745 - DNA, 25 bp, Saccharomyces cerevisiae
gctggtttctctctacctcacgcca

SEQ ID NO: 196746 - DNA, 25 bp, Saccharomyces cerevisiae
acctcacgccattttgagaatcgat

SEQ ID NO: 196747 - DNA, 25 bp, Saccharomyces cerevisiae
ttgtccgtgacatcaaggaaaaact

SEQ ID NO: 196748 - DNA, 25 bp, Saccharomyces cerevisiae
tggtttctctctacctcacgccatt

SEQ ID NO: 196749 - DNA, 25 bp, Saccharomyces cerevisiae
aagatcttgagtgaacgtggttact

SEQ ID NO: 196750 - DNA, 25 bp, Saccharomyces cerevisiae
agatttgactgactacttgatgaag

SEQ ID NO: 196751 - DNA, 25 bp, Saccharomyces cerevisiae
tccaccactgctgaaagagaaattg

SEQ ID NO: 196752 - DNA, 25 bp, Saccharomyces cerevisiae
ctgctcaatcttcttcaattgaaaa

SEQ ID NO: 196753 - DNA, 25 bp, Saccharomyces cerevisiae
ctgactacttgatgaagatcttgag

SEQ ID NO: 196754 - DNA, 25 bp, Saccharomyces cerevisiae
ggttactctttctccaccactgctg

SEQ ID NO: 196755 - DNA, 25 bp, Saccharomyces cerevisiae
ctcacgtcgttccaatttacgctgg

SEQ ID NO: 196756 - DNA, 25 bp, Saccharomyces cerevisiae
acgctggtttctctctacctcacgc

SEQ ID NO: 196757 - DNA, 25 bp, Saccharomyces cerevisiae
ctcacgccattttgagaatcgattt

SEQ ID NO: 196758 - DNA, 25 bp, Saccharomyces cerevisiae
aatcgatttggccggtagagatttg

SEQ ID NO: 196759 - DNA, 25 bp, Saccharomyces cerevisiae
caagaaatgcaaaccgctgctcaat

SEQ ID NO: 196760 - DNA, 25 bp, Saccharomyces cerevisiae
tttctccaccactgctgaaagagaa

SEQ ID NO: 196761 - DNA, 25 bp, Saccharomyces cerevisiae
tgagaatcgatttggccggtagaga

SEQ ID NO: 196762 - DNA, 25 bp, Saccharomyces cerevisiae
gctcaatcttcttcaattgaaaaat

SEQ ID NO: 196763 - DNA, 25 bp, Saccharomyces cerevisiae
tactcacgtcgttccaatttacgct

SEQ ID NO: 196764 - DNA, 25 bp, Saccharomyces cerevisiae
ttgactgactacttgatgaagatct

SEQ ID NO: 196765 - DNA, 25 bp, Saccharomyces cerevisiae
accgctgctcaatcttcttcaattg

SEQ ID NO: 196766 - DNA, 25 bp, Saccharomyces cerevisiae
cgctgctcaatcttcttcaattgaa

SEQ ID NO: 196767 - DNA, 25 bp, Saccharomyces cerevisiae
gcaaaccgctgctcaatcttcttca

SEQ ID NO: 196768 - DNA, 25 bp, Saccharomyces cerevisiae
tcaatcttcttcaattgaaaaatcc

SEQ ID NO: 196769 - DNA, 25 bp, Saccharomyces cerevisiae
ccattttgagaatcgatttggccgg

SEQ ID NO: 196770 - DNA, 25 bp, Saccharomyces cerevisiae
atgcaaaccgctgctcaatcttctt

SEQ ID NO: 196771 - DNA, 25 bp, Saccharomyces cerevisiae
agaatcgatttggccggtagagatt

SEQ ID NO: 196772 - DNA, 25 bp, Saccharomyces cerevisiae
gactgactacttgatgaagatcttg

SEQ ID NO: 196773 - DNA, 25 bp, Saccharomyces cerevisiae
aaaccgctgctcaatcttcttcaat

SEQ ID NO: 196774 - DNA, 25 bp, Saccharomyces cerevisiae
tttggccggtagagatttgactgac

SEQ ID NO: 196775 - DNA, 25 bp, Saccharomyces cerevisiae
aaatgcaaaccgctgctcaatcttc

SEQ ID NO: 196776 - DNA, 25 bp, Saccharomyces cerevisiae
cgccattttgagaatcgatttggcc

SEQ ID NO: 196777 - DNA, 25 bp, Saccharomyces cerevisiae
gatggtgttactcacgtcgttccaa

SEQ ID NO: 196778 - DNA, 25 bp, Saccharomyces cerevisiae
gatttggccggtagagatttgactg

SEQ ID NO: 196779 - DNA, 25 bp, Saccharomyces cerevisiae
gtggttactctttctccaccactgc

SEQ ID NO: 196780 - DNA, 25 bp, Saccharomyces cerevisiae
tctccaccactgctgaaagagaaat

SEQ ID NO: 196781 - DNA, 25 bp, Saccharomyces cerevisiae
ccttggacttcgaacaagaaatgca

SEQ ID NO: 196782 - DNA, 25 bp, Saccharomyces cerevisiae
tcgatttggccggtagagatttgac

SEQ ID NO: 196783 - DNA, 25 bp, Saccharomyces cerevisiae
cacgccattttgagaatcgatttgg

SEQ ID NO: 196784 - DNA, 25 bp, Saccharomyces cerevisiae
tccaatttacgctggtttctctcta

SEQ ID NO: 196785 - DNA, 25 bp, Saccharomyces cerevisiae
caccactgctgaaagagaaattgtc

SEQ ID NO: 196786 - DNA, 25 bp, Saccharomyces cerevisiae
tttgagaatcgatttggccggtaga

SEQ ID NO: 196787 - DNA, 25 bp, Saccharomyces cerevisiae
gtccgtgacatcaaggaaaaactat

SEQ ID NO: 196788 - DNA, 25 bp, Saccharomyces cerevisiae
atttgactgactacttgatgaagat

SEQ ID NO: 196789 - DNA, 25 bp, Saccharomyces cerevisiae
ttacgctggtttctctctacctcac

SEQ ID NO: 196790 - DNA, 25 bp, Saccharomyces cerevisiae
ctacctcacgccattttgagaatcg

SEQ ID NO: 196791 - DNA, 25 bp, Bacillus subtilis
gtacggtcagtttgcgtaaagaaga

SEQ ID NO: 196792 - DNA, 25 bp, Bacillus subtilis
gaagcgatcttttccgccggaatcc

SEQ ID NO: 196793 - DNA, 25 bp, Bacillus subtilis
tatcccgtcaaaggattccgtttct

SEQ ID NO: 196794 - DNA, 25 bp, Bacillus subtilis
caattcggtcaattgtcactgtcat

SEQ ID NO: 196795 - DNA, 25 bp, Bacillus subtilis
ttcatcagccggattttgttattga

SEQ ID NO: 196796 - DNA, 25 bp, Bacillus subtilis
ttccggcgcataaagtcagcaaggt

SEQ ID NO: 196797 - DNA, 25 bp, Bacillus subtilis
atctcggatacaatagaggcaaaga

SEQ ID NO: 196798 - DNA, 25 bp, Bacillus subtilis
aagaattcagctaacgcttccagac

SEQ ID NO: 196799 - DNA, 25 bp, Bacillus subtilis
gctgaagcagcccgcatattaggcg

SEQ ID NO: 196800 - DNA, 25 bp, Bacillus subtilis
gatttgacagaagcggaactctctt

SEQ ID NO: 196801 - DNA, 25 bp, Bacillus subtilis
tcatcagccggattttgttattgat

SEQ ID NO: 196802 - DNA, 25 bp, Bacillus subtilis
ccaaattttgcgctcggtgcgatac

SEQ ID NO: 196803 - DNA, 25 bp, Bacillus subtilis
gaaaaagggatcggagccatcatcg

SEQ ID NO: 196804 - DNA, 25 bp, Bacillus subtilis
attatctgatgtgatgcctgttgag

SEQ ID NO: 196805 - DNA, 25 bp, Bacillus subtilis
acaaccggtttctcagaagctgatt

SEQ ID NO: 196806 - DNA, 25 bp, Bacillus subtilis
acaccacattttgaccttgtagggg

SEQ ID NO: 196807 - DNA, 25 bp, Bacillus subtilis
acaaccggatgtcttgattgattta

SEQ ID NO: 196808 - DNA, 25 bp, Bacillus subtilis
tcatcatgaccagaagcttgacgca

SEQ ID NO: 196809 - DNA, 25 bp, Bacillus subtilis
tcttgattgatttaacaacgcccga

SEQ ID NO: 196810 - DNA, 25 bp, Bacillus subtilis
ggccatagaccatacatacgatcag

SEQ ID NO: 196811 - DNA, 25 bp, Bacillus subtilis
ctcggtgcgatactgatgatgaaat

SEQ ID NO: 196812 - DNA, 25 bp, Bacillus subtilis
ttagagcacggagtccgtccagttg

SEQ ID NO: 196813 - DNA, 25 bp, Bacillus subtilis
tgaaccggatgtctcggcattaatc

SEQ ID NO: 196814 - DNA, 25 bp, Bacillus subtilis
ctgcggaaattcttgtgcgcacact

SEQ ID NO: 196815 - DNA, 25 bp, Bacillus subtilis
cccacagtgatgatgtcgagatcgg

SEQ ID NO: 196816 - DNA, 25 bp, Bacillus subtilis
gcggaaattcttgtgcgcacacttg

SEQ ID NO: 196817 - DNA, 25 bp, Bacillus subtilis
tgaagattgatcagcttgtgtatgg

SEQ ID NO: 196818 - DNA, 25 bp, Bacillus subtilis
ccgaatgtataatgctgacgttctt

SEQ ID NO: 196819 - DNA, 25 bp, Bacillus subtilis
atgaaggtgttttcgaattccgtga

SEQ ID NO: 196820 - DNA, 25 bp, Bacillus subtilis
gtcatttttttgcgcgacccgctga

SEQ ID NO: 196821 - DNA, 25 bp, Bacillus subtilis
aaagaatcatgatctatacgcaacc

SEQ ID NO: 196822 - DNA, 25 bp, Bacillus subtilis
gaaaattgctttgatcgcgcatgac

SEQ ID NO: 196823 - DNA, 25 bp, Bacillus subtilis
ccgtttatgtgatgtgtattccatt

SEQ ID NO: 196824 - DNA, 25 bp, Bacillus subtilis
atacggccggttttgtgttagcagc

SEQ ID NO: 196825 - DNA, 25 bp, Bacillus subtilis
ttcatttgtatccaaggtgctgaat

SEQ ID NO: 196826 - DNA, 25 bp, Bacillus subtilis
ttgtatccaaggtgctgaatcttgg

SEQ ID NO: 196827 - DNA, 25 bp, Bacillus subtilis
gaaccgggccgttctctcgtgggag

SEQ ID NO: 196828 - DNA, 25 bp, Bacillus subtilis
cgggccgttctctcgtgggagacgc

SEQ ID NO: 196829 - DNA, 25 bp, Bacillus subtilis
tcatgccactgaatacgttgaaaaa

SEQ ID NO: 196830 - DNA, 25 bp, Bacillus subtilis
tattcatttgtatccaaggtgctga

SEQ ID NO: 196831 - DNA, 25 bp, Bacillus subtilis
gtgctgaatcttggaggaggtttcg

SEQ ID NO: 196832 - DNA, 25 bp, Bacillus subtilis
ggccggttttgtgttagcagcggaa

SEQ ID NO: 196833 - DNA, 25 bp, Bacillus subtilis
gttttgtgttagcagcggaaaaaat

SEQ ID NO: 196834 - DNA, 25 bp, Bacillus subtilis
atgccactgaatacgttgaaaaaat

SEQ ID NO: 196835 - DNA, 25 bp, Bacillus subtilis
atcagtcgcaatgattcagctcgct

SEQ ID NO: 196836 - DNA, 25 bp, Bacillus subtilis
gagagctatatacggctgttgcagc

SEQ ID NO: 196837 - DNA, 25 bp, Bacillus subtilis
tacacctctttacgtatatgatgtg

SEQ ID NO: 196838 - DNA, 25 bp, Bacillus subtilis
cacctctttacgtatatgatgtggc

SEQ ID NO: 196839 - DNA, 25 bp, Bacillus subtilis
gcaggcgtttatttctgcagggctg

SEQ ID NO: 196840 - DNA, 25 bp, Bacillus subtilis
ggatgctctctatttagcggagaaa

SEQ ID NO: 196841 - DNA, 25 bp, Bacillus subtilis
ggctttaatacgtgagcgtgctaaa

SEQ ID NO: 196842 - DNA, 25 bp, Bacillus subtilis
ggagaaatatggtacacctctttac

SEQ ID NO: 196843 - DNA, 25 bp, Bacillus subtilis
ggactttctttagatgtcgtatccg

SEQ ID NO: 196844 - DNA, 25 bp, Bacillus subtilis
agcggagaaatatggtacacctctt

SEQ ID NO: 196845 - DNA, 25 bp, Bacillus subtilis
tagaaatcggaggtgtggatgctct

SEQ ID NO: 196846 - DNA, 25 bp, Bacillus subtilis
ctgaacgggccattgaacaagtatt

SEQ ID NO: 196847 - DNA, 25 bp, Bacillus subtilis
cttcggatcacgcccggagtagaag

SEQ ID NO: 196848 - DNA, 25 bp, Bacillus subtilis
tttcgatcttcataacggacaaact

SEQ ID NO: 196849 - DNA, 25 bp, Bacillus subtilis
actgaacgggccattgaacaagtat

SEQ ID NO: 196850 - DNA, 25 bp, Bacillus subtilis
gactacattacaacgggccaggaag

SEQ ID NO: 196851 - DNA, 25 bp, Bacillus subtilis
agtttggtttcgatcttcataacgg

SEQ ID NO: 196852 - DNA, 25 bp, Bacillus subtilis
gaacgcatccactttcatggaaaca

SEQ ID NO: 196853 - DNA, 25 bp, Bacillus subtilis
gcttcttgaagacctatgtaaagaa

SEQ ID NO: 196854 - DNA, 25 bp, Bacillus subtilis
tccattgccatatcggctcgcaaat

SEQ ID NO: 196855 - DNA, 25 bp, Bacillus subtilis
tgactacattacaacgggccaggaa

SEQ ID NO: 196856 - DNA, 25 bp, Bacillus subtilis
tacgcatgactacattacaacgggc

SEQ ID NO: 196857 - DNA, 25 bp, Bacillus subtilis
atggtcatgctgccgcaggatgatc

SEQ ID NO: 196858 - DNA, 25 bp, Bacillus subtilis
ctgtcaaaaattgagtcacgtccga

SEQ ID NO: 196859 - DNA, 25 bp, Bacillus subtilis
gagtcacgtccgactaaaaccggat

SEQ ID NO: 196860 - DNA, 25 bp, Bacillus subtilis
gaccatcccgagctgaatatcgggg

SEQ ID NO: 196861 - DNA, 25 bp, Bacillus subtilis
tcaaaaattgagtcacgtccgacta

SEQ ID NO: 196862 - DNA, 25 bp, Bacillus subtilis
gtctgcattttcttggagaaattta

SEQ ID NO: 196863 - DNA, 25 bp, Bacillus subtilis
ctgtctcccgatgaaaacatatctt

SEQ ID NO: 196864 - DNA, 25 bp, Bacillus subtilis
tccggggcgctgcatagagtgctgt

SEQ ID NO: 196865 - DNA, 25 bp, Bacillus subtilis
atcggggtcattgccaatgatatgg

SEQ ID NO: 196866 - DNA, 25 bp, Bacillus subtilis
gagctctaggcccaaaacgacctta

SEQ ID NO: 196867 - DNA, 25 bp, Bacillus subtilis
cctgtcaaaaattgagtcacgtccg

SEQ ID NO: 196868 - DNA, 25 bp, Bacillus subtilis
ttttccattctacaccatggtaaaa

SEQ ID NO: 196869 - DNA, 25 bp, Bacillus subtilis
gattcagtagcagatgccgttcaaa

SEQ ID NO: 196870 - DNA, 25 bp, Bacillus subtilis
gcagatgccgttcaaaaggtcgatt

SEQ ID NO: 196871 - DNA, 25 bp, Bacillus subtilis
ctggaagcaacgttctttccattca

SEQ ID NO: 196872 - DNA, 25 bp, Bacillus subtilis
gtgacactgtctatcagtacgtcgg

SEQ ID NO: 196873 - DNA, 25 bp, Bacillus subtilis
tgacactgtctatcagtacgtcggc

SEQ ID NO: 196874 - DNA, 25 bp, Bacillus subtilis
aggtcgatttaagtagaagtgcgtt

SEQ ID NO: 196875 - DNA, 25 bp, Bacillus subtilis
gtagctgattctggaagcaacgttc

SEQ ID NO: 196876 - DNA, 25 bp, Bacillus subtilis
tatcagtacgtcggcaatggaagaa

SEQ ID NO: 196877 - DNA, 25 bp, Bacillus subtilis
ggaggataggtcaggtgcgttatct

SEQ ID NO: 196878 - DNA, 25 bp, Bacillus subtilis
tttggaggataggtcaggtgcgtta

SEQ ID NO: 196879 - DNA, 25 bp, Bacillus subtilis
gctcgacaaaatttactcacattca

SEQ ID NO: 196880 - DNA, 25 bp, Bacillus subtilis
gaacatgttgcttaccgcaccattc

SEQ ID NO: 196881 - DNA, 25 bp, Bacillus subtilis
ctacatttacacatctagcagtcag

SEQ ID NO: 196882 - DNA, 25 bp, Bacillus subtilis
ggagtgtatagatgcagccgttgca

SEQ ID NO: 196883 - DNA, 25 bp, Bacillus subtilis
tcggttatttaggtccagcagctac

SEQ ID NO: 196884 - DNA, 25 bp, Bacillus subtilis
aatcgtgggtgaaatgacgttgccg

SEQ ID NO: 196885 - DNA, 25 bp, Bacillus subtilis
atttcttcatcgacattttccttcc

SEQ ID NO: 196886 - DNA, 25 bp, Bacillus subtilis
gttgcaggcgaagttgattttgctt

SEQ ID NO: 196887 - DNA, 25 bp, Bacillus subtilis
ccgaacatgttgcttaccgcaccat

SEQ ID NO: 196888 - DNA, 25 bp, Bacillus subtilis
atatgaatacgccaattctaccggg

SEQ ID NO: 196889 - DNA, 25 bp, Bacillus subtilis
tacatttacacatctagcagtcagt

SEQ ID NO: 196890 - DNA, 25 bp, Bacillus subtilis
acgcgagagacgtgcttccgaagga

SEQ ID NO: 196891 - DNA, 25 bp, Bacillus subtilis
gaaggatatgttccatcagccgtac

SEQ ID NO: 196892 - DNA, 25 bp, Bacillus subtilis
ggattggccgcttgtcgggaaaatc

SEQ ID NO: 196893 - DNA, 25 bp, Bacillus subtilis
gacgtagtcgttgtcattccttttt

SEQ ID NO: 196894 - DNA, 25 bp, Bacillus subtilis
aaagaacagctcgcgcttcatttcc

SEQ ID NO: 196895 - DNA, 25 bp, Bacillus subtilis
tcctcattgctgcgatcatgtccaa

SEQ ID NO: 196896 - DNA, 25 bp, Bacillus subtilis
atgcttgtgcctgagctgtcaaaag

SEQ ID NO: 196897 - DNA, 25 bp, Bacillus subtilis
gacgagacccaaatgatccgcgtcc

SEQ ID NO: 196898 - DNA, 25 bp, Bacillus subtilis
gaagggcgcatatggaacggctctc

SEQ ID NO: 196899 - DNA, 25 bp, Bacillus subtilis
gtgatcggcctgcatgaggatgacg

SEQ ID NO: 196900 - DNA, 25 bp, Bacillus subtilis
gaaggagtttccatatgccgatgcc

SEQ ID NO: 196901 - DNA, 25 bp, Bacillus subtilis
gcatatgcagcccgtgctaacatga

SEQ ID NO: 196902 - DNA, 25 bp, Bacillus subtilis
aactcgctcaagctgtcatgtacgg

SEQ ID NO: 196903 - DNA, 25 bp, Bacillus subtilis
gacggaaactttgacgatgcgctta

SEQ ID NO: 196904 - DNA, 25 bp, Bacillus subtilis
caggccttccgaaaatgcgcggctt

SEQ ID NO: 196905 - DNA, 25 bp, Bacillus subtilis
agcgcctgatgttttagcgatcccg

SEQ ID NO: 196906 - DNA, 25 bp, Bacillus subtilis
gtcaacaggtaacacttccgctgct

SEQ ID NO: 196907 - DNA, 25 bp, Bacillus subtilis
gaaatgcattgtcatcatcccgaac

SEQ ID NO: 196908 - DNA, 25 bp, Bacillus subtilis
aaactgctgccttcgaagtgtgcga

SEQ ID NO: 196909 - DNA, 25 bp, Bacillus subtilis
gtcaacccttaccgcattgaaggcc

SEQ ID NO: 196910 - DNA, 25 bp, Bacillus subtilis
gatgcgcttaaaattgtccgttcca

SEQ ID NO: 196911 - DNA, 25 bp, Bacillus subtilis
gtaacagatcaaacaccggcgctaa

SEQ ID NO: 196912 - DNA, 25 bp, Bacillus subtilis
tatcagctgatcgcccgtgtagaag

SEQ ID NO: 196913 - DNA, 25 bp, Bacillus subtilis
aaatgcctcctgtccatgtgaaggt

SEQ ID NO: 196914 - DNA, 25 bp, Bacillus subtilis
gttcttgcgcgtctatcgcaggagt

SEQ ID NO: 196915 - DNA, 25 bp, Bacillus subtilis
tcagtcggaatggcgctcagcagat

SEQ ID NO: 196916 - DNA, 25 bp, Bacillus subtilis
gccccggctttgattcagtcggaat

SEQ ID NO: 196917 - DNA, 25 bp, Bacillus subtilis
agatccgaacacagcggtcgacatt

SEQ ID NO: 196918 - DNA, 25 bp, Bacillus subtilis
tgaaatccttcacgcatatcagctg

SEQ ID NO: 196919 - DNA, 25 bp, Bacillus subtilis
gataacctgatctaccaagtggcta

SEQ ID NO: 196920 - DNA, 25 bp, Bacillus subtilis
tctgtcactgttcccggaagcacag

SEQ ID NO: 196921 - DNA, 25 bp, Bacillus subtilis
gaacgaagccgacatgctgttctct

SEQ ID NO: 196922 - DNA, 25 bp, Bacillus subtilis
aaatcaagcctgtcacattgccgac

SEQ ID NO: 196923 - DNA, 25 bp, Escherichia coli
gcaaactcgattttctacggttgca

SEQ ID NO: 196924 - DNA, 25 bp, Escherichia coli
gcaaactggggctaaatccgcagca

SEQ ID NO: 196925 - DNA, 25 bp, Escherichia coli
acaacagcaacgtcttgaacaggcg

SEQ ID NO: 196926 - DNA, 25 bp, Escherichia coli
tgccaacctcttacgtgcgcctttc

SEQ ID NO: 196927 - DNA, 25 bp, Escherichia coli
gaacagactcaggcgatgtgcttta

SEQ ID NO: 196928 - DNA, 25 bp, Escherichia coli
tatggcaggcgcaaactcgattttc

SEQ ID NO: 196929 - DNA, 25 bp, Escherichia coli
agactcaggcgatgtgctttatggc

SEQ ID NO: 196930 - DNA, 25 bp, Escherichia coli
caacctcttacgtgcgcctttctgc

SEQ ID NO: 196931 - DNA, 25 bp, Escherichia coli
actggggctaaatccgcagcaaact

SEQ ID NO: 196932 - DNA, 25 bp, Escherichia coli
tttctacggttgcaaactgctgacc

SEQ ID NO: 196933 - DNA, 25 bp, Escherichia coli
gggataacgaacaacagcaacgtct

SEQ ID NO: 196934 - DNA, 25 bp, Escherichia coli
catttcgatcctcgtcaggtgcagg

SEQ ID NO: 196935 - DNA, 25 bp, Escherichia coli
ttcgatcctcgtcaggtgcaggtca

SEQ ID NO: 196936 - DNA, 25 bp, Escherichia coli
ctggatctgctgtttgaagcgcagc

SEQ ID NO: 196937 - DNA, 25 bp, Escherichia coli
tcgcgctacaaaaccgggctggaag

SEQ ID NO: 196938 - DNA, 25 bp, Escherichia coli
tcgatcctcgtcaggtgcaggtcag

SEQ ID NO: 196939 - DNA, 25 bp, Escherichia coli
gctggatctgctgtttgaagcgcag

SEQ ID NO: 196940 - DNA, 25 bp, Escherichia coli
tttcgatcctcgtcaggtgcaggtc

SEQ ID NO: 196941 - DNA, 25 bp, Escherichia coli
gagcggttgatggaagttgaacagg

SEQ ID NO: 196942 - DNA, 25 bp, Escherichia coli
cgcgctacaaaaccgggctggaagc

SEQ ID NO: 196943 - DNA, 25 bp, Escherichia coli
cggcaggatcgacgcgcttctgtat

SEQ ID NO: 196944 - DNA, 25 bp, Escherichia coli
aagccgagcggttgatggaagttga

SEQ ID NO: 196945 - DNA, 25 bp, Escherichia coli
ccggattattgctgcaactggcaaa

SEQ ID NO: 196946 - DNA, 25 bp, Escherichia coli
tgtatgacgctgggcacgttgagtg

SEQ ID NO: 196947 - DNA, 25 bp, Escherichia coli
cggaaagcgtgccaatcaacatgct

SEQ ID NO: 196948 - DNA, 25 bp, Escherichia coli
cacgcacttatcaggaacgcctcga

SEQ ID NO: 196949 - DNA, 25 bp, Escherichia coli
tgccgggatcaaagtctgttctggc

SEQ ID NO: 196950 - DNA, 25 bp, Escherichia coli
gcattgtgggcttaggcgaaacggt

SEQ ID NO: 196951 - DNA, 25 bp, Escherichia coli
gctgggcacgttgagtgaatctcag

SEQ ID NO: 196952 - DNA, 25 bp, Escherichia coli
agatcgcgccggattattgctgcaa

SEQ ID NO: 196953 - DNA, 25 bp, Escherichia coli
cgggatcaaagtctgttctggcggc

SEQ ID NO: 196954 - DNA, 25 bp, Escherichia coli
aaaagatcgcgccggattattgctg

SEQ ID NO: 196955 - DNA, 25 bp, Escherichia coli
ccgggatcaaagtctgttctggcgg

SEQ ID NO: 196956 - DNA, 25 bp, Escherichia coli
accgccagatgaaatcgaacagtcg

SEQ ID NO: 196957 - DNA, 25 bp, Escherichia coli
agtgccatgcgttcgctgaaaggca

SEQ ID NO: 196958 - DNA, 25 bp, Escherichia coli
gtggacgagcgtccgcatgctaatc

SEQ ID NO: 196959 - DNA, 25 bp, Escherichia coli
tattaacgcgttcgcagttgcagcg

SEQ ID NO: 196960 - DNA, 25 bp, Escherichia coli
cgctggtgcagggatcgttacccga

SEQ ID NO: 196961 - DNA, 25 bp, Escherichia coli
gaacggcgtgcattatcaacatcat

SEQ ID NO: 196962 - DNA, 25 bp, Escherichia coli
tcatattcagcccatcacgctgtgg

SEQ ID NO: 196963 - DNA, 25 bp, Escherichia coli
cagcgattgcaactggcctggccgc

SEQ ID NO: 196964 - DNA, 25 bp, Escherichia coli
cggtgccacgcatcttcatgaaggg

SEQ ID NO: 196965 - DNA, 25 bp, Escherichia coli
cacgctgtggtttgatgatgcgctc

SEQ ID NO: 196966 - DNA, 25 bp, Escherichia coli
atcaacatcatattcagcccatcac

SEQ ID NO: 196967 - DNA, 25 bp, Escherichia coli
gtaaatacacccacgtactggacgc

SEQ ID NO: 196968 - DNA, 25 bp, Escherichia coli
acgcgggttgtggacctggctggat

SEQ ID NO: 196969 - DNA, 25 bp, Escherichia coli
gcatggagcaatctcgcagtgcagt

SEQ ID NO: 196970 - DNA, 25 bp, Escherichia coli
atgcagatctacagcgccagagtgc

SEQ ID NO: 196971 - DNA, 25 bp, Escherichia coli
ccagaaggatgccgcagaccattat

SEQ ID NO: 196972 - DNA, 25 bp, Escherichia coli
cacggcactccgcgagctgtatcgg

SEQ ID NO: 196973 - DNA, 25 bp, Escherichia coli
atggagcaatctcgcagtgcagtgg

SEQ ID NO: 196974 - DNA, 25 bp, Escherichia coli
cgccgccaatgcttgttcaggcacg

SEQ ID NO: 196975 - DNA, 25 bp, Escherichia coli
acgttcgatcttgcatggagcaatc

SEQ ID NO: 196976 - DNA, 25 bp, Escherichia coli
ctgccgttagcgactgcgacgttcg

SEQ ID NO: 196977 - DNA, 25 bp, Escherichia coli
aggatgccgcagaccattatctggc

SEQ ID NO: 196978 - DNA, 25 bp, Escherichia coli
ttctgacactttcacttttgcagat

SEQ ID NO: 196979 - DNA, 25 bp, Escherichia coli
gccggtgatactggtagttggtgtg

SEQ ID NO: 196980 - DNA, 25 bp, Escherichia coli
aactcggctgtattaatcacgcgat

SEQ ID NO: 196981 - DNA, 25 bp, Escherichia coli
tgctgggagagatcccctggcttgc

SEQ ID NO: 196982 - DNA, 25 bp, Escherichia coli
aacaactgccggtgatactggtagt

SEQ ID NO: 196983 - DNA, 25 bp, Escherichia coli
acaacacgccggactgactctggcg

SEQ ID NO: 196984 - DNA, 25 bp, Escherichia coli
acttttgcagattgggtaacacagg

SEQ ID NO: 196985 - DNA, 25 bp, Escherichia coli
gtcacgctgaatatatgaccacgct

SEQ ID NO: 196986 - DNA, 25 bp, Escherichia coli
cacaggtaatacaacacgccggact

SEQ ID NO: 196987 - DNA, 25 bp, Escherichia coli
tgacactttcacttttgcagattgg

SEQ ID NO: 196988 - DNA, 25 bp, Escherichia coli
tcacgctgaatatatgaccacgctc

SEQ ID NO: 196989 - DNA, 25 bp, Escherichia coli
gggcagaccgatagaatcattggta

SEQ ID NO: 196990 - DNA, 25 bp, Escherichia coli
acgcaacagtaaatccttacacctt

SEQ ID NO: 196991 - DNA, 25 bp, Escherichia coli
gcagcaggctaccggacggcaggtt

SEQ ID NO: 196992 - DNA, 25 bp, Escherichia coli
cctctggcagcgaaaagaccccgga

SEQ ID NO: 196993 - DNA, 25 bp, Escherichia coli
gtaaatccttacaccttcgcagaac

SEQ ID NO: 196994 - DNA, 25 bp, Escherichia coli
cgcaacagtaaatccttacaccttc

SEQ ID NO: 196995 - DNA, 25 bp, Escherichia coli
ctggcagcgaaaagaccccggaagg

SEQ ID NO: 196996 - DNA, 25 bp, Escherichia coli
cctgcagctggattacgcaacagta

SEQ ID NO: 196997 - DNA, 25 bp, Escherichia coli
agcctgcagctggattacgcaacag

SEQ ID NO: 196998 - DNA, 25 bp, Escherichia coli
cttacaccttcgcagaacccacttc

SEQ ID NO: 196999 - DNA, 25 bp, Escherichia coli
gaatcattggtaatgagcgccggat

SEQ ID NO: 197000 - DNA, 25 bp, Bacteriophage P1
gttaatccatattggcagaacgaaa

SEQ ID NO: 197001 - DNA, 25 bp, Bacteriophage P1
aagatatctcacgtactgacggtgg

SEQ ID NO: 197002 - DNA, 25 bp, Bacteriophage P1
ctgttttgccgggtcagaaaaaatg

SEQ ID NO: 197003 - DNA, 25 bp, Bacteriophage P1
atgatccgaataactacctgttttg

SEQ ID NO: 197004 - DNA, 25 bp, Bacteriophage P1
aaaaaatggtgttgccgcgccatct

SEQ ID NO: 197005 - DNA, 25 bp, Bacteriophage P1
cgctggttagcaccgcaggtgtaga

SEQ ID NO: 197006 - DNA, 25 bp, Bacteriophage P1
aacgaaaacgctggttagcaccgca

SEQ ID NO: 197007 - DNA, 25 bp, Bacteriophage P1
tagctgatgatccgaataactacct

SEQ ID NO: 197008 - DNA, 25 bp, Bacteriophage P1
ccagctatcaactcgcgccctggaa

SEQ ID NO: 197009 - DNA, 25 bp, Bacteriophage P1
ggtcgagcgatggatttccgtctct

SEQ ID NO: 197010 - DNA, 25 bp, Bacteriophage P1
ataactacctgttttgccgggtcag

SEQ ID NO: 197011 - DNA, 25 bp, Bacteriophage P1
gccggtgaacgtgcaaaacaggctc

SEQ ID NO: 197012 - DNA, 25 bp, Bacteriophage P1
tctgtccgtttgccggtcgtgggcg

SEQ ID NO: 197013 - DNA, 25 bp, Bacteriophage P1
gcaaaacaggctctagcgttcgaac

SEQ ID NO: 197014 - DNA, 25 bp, Bacteriophage P1
ttgggccagctaaacatgcttcatc

SEQ ID NO: 197015 - DNA, 25 bp, Bacteriophage P1
gatgttcgcgattatcttctatatc

SEQ ID NO: 197016 - DNA, 25 bp, Bacteriophage P1
gatcgccaggcgttttctgagcata

SEQ ID NO: 197017 - DNA, 25 bp, Bacteriophage P1
cggaaatggtttcccgcagaacctg

SEQ ID NO: 197018 - DNA, 25 bp, Bacteriophage P1
atcgctgccaggatatacgtaatct

SEQ ID NO: 197019 - DNA, 25 bp, Bacteriophage P1
gctgtttcactggttatgcggcgga

SEQ ID NO: 197020 - DNA, 25 bp, Bacteriophage P1
gggattgcttataacaccctgttac

SEQ ID NO: 197021 - DNA, 25 bp, Bacteriophage P1
gcactgatttcgaccaggttcgttc

SEQ ID NO: 197022 - DNA, 25 bp, Artificial Sequence
  Description of Artificial Sequence: Synthetic polynucleotide sequence
gaatcaattaacatatggtttctta

SEQ ID NO: 197023 - DNA, 25 bp, Artificial Sequence
  Description of Artificial Sequence: Synthetic polynucleotide sequence
gctcttggtgaccaggatacttttt
